United States Patent Application Publication US 2026/0058010 A1 - sequence listing, part 23

SEQ ID NO: 260 - DNA, 18564 bp, Homo sapiens
  source 1..18564: mol_type = genomic DNA
tccctaaactaccgtttatgatgtgtcaggaaaaacaacctaatggctctggggacttttaagttgggcactgaagacacctcaatttcccccaaaactttagagcacagtttggaacagagaattcgcctgtatgttgagggggagtgaatttctccaatcttaatgttatccagggggccgcctaagttgccttctgagggtcctgtgcgtagatgtttttaattctacaaagaaggagaggaacaggaaagaagagagggagaagaaaggcaaagcggaagaaaagaaagcgctttaacccctttcaattagcctggggattcaaagactaaagttaaatccggccataaagtttattgcttcagactcacaagcggctgagaacagtcccgccgaaataaaaagaacatgcaggcaaacagggttcagggcctggtcccgggtgcgggggagggggtcctgaacacccccccacaccagggtggggatccttggtcctcagggtccagtgggcgctagcagcccaggatccaccttgcaacccgggggcccagcctggaggtgcagccccagcctcgccggcctctgccaccctcccgctctcgcgagctagcctgaaacccggccccgaaggccgccgcctcaattcagccctgccaaatgaccccggcccgcgaagacatattgccacagccccgtaaggaatcccgccagagtccgcctcggccctgccccggcctttctttcaaactcctgagcgcagcgcggccctcggcgcccgcggccggcgccccactgtctcccagccccgaccccagggctccgcgacccccaggagctggccccggccggcccagcaattgcgcgggggactgggggtgcggccctgccaggtccccacacacaggcccattcgcacacaaaaatcatctttttgcacgccggcgggagcagcggaagtcattaacatccgcggttgtgctgcaattaaagttaggcctggggatgcggcgcggccacaggcgctgctcactctgctgcctccgcagagttggctcctggcgctgctcttttgggcagagggaaagtttgctctgccttttcgaattcagaggcagcctgagttattgaaccagagagagagagagagagagagagagagagaaagtttccaaagtacaaataaacttgaaagcgctcaggaggcgagcttaccttaactcggagggagccatttttcagagagttttgagaacttgtggtttggacacttctggacctaaaattgacagtttgaatggccaggcggcacacgtagcctgcaaaagagtcaaatggagtccagcgttagtgagattatatgttatgtggtatataatgttggatgtcaactccccaaaaccataaaacttactttaatggccccacgtgacgttttatagccagtgagccgatctgtctgtgctatggatgattttacgatctaattcatagacaaaaccctattcatttggcacccaaatgtcatatagccggaactggggcttataaagtttactgttttataacttttaaaaggaaagacggcatcagtgtaagcagtcggtaaatgtgcaaatctctagttgcgctttagctgctctgaggagtttcccaatcgagctaggatggggtaagtaccttcaatttgtagcaaattaattgtagcaaaagaagccaactgggtcccgggtgaagagtggggaaggggtgctgggatgggttaagggcagagggtttggggtccacagacagacatagcagcgtcttcagcaagtggaggcctaggacagccttaggaaagaggcaggatctgtgtggcctgagggcggctaacaaagccctgggttttttctccttttttcttgctctttctctcttttttgtacccagcaagttaacttggtttcctcagagatggacagggtgttctggggctttggaacagcctacagctttttccaccttctgccctgaactttgcaatgggtcagaggtagggaagcgatgggacagtgttggtatgaggtctccctgcacaggtcatctgctcaggtagcctcagacccaacagcttccaagactgcacagacagacagaaaagcagacagagccgctcactatttggcacaaaccagaccaagagaacttacaatagaaagtttattttttgttccagtcagtattttttccttaaaaacaaatacaaaaaaaaaaaaaaaaaaaaaaaagctgatcacagtttgcttaaaacagccagacttggacaatatttgtaactttgttcacaaaaacatacatcactgaagctgcgcttataagagccacttccagagttcgtgcaaagggtcctataaaggcacgcagggacacaccgcttggagtcacagttttcatcacagagtcactagtcactacacgtcgaacaagttgtgtctcatcaagtcacctctacaacagcattaattacacaaggaatataggtagtttgaataaaaatatctttaacagcttggagctattgagacaggaacacttccacgcacatgcacagttaaacaacttgagtgcaacacacaacattggcactaaacgagattgaagggggactttttgtgtgtttttttttctcttttctttttttgttatagttacttcaagtaacacagcttgcttcatataaataagttaaaacatctattttttttcaagacaaagccattcaggacaaagagatgaacagaaagcagatctacttatacaggcgctataatggcaataaacaggctcatgattaaaagatgaattagggcaacgagaacagggcttcttcacagaaggaacacaagggagtttcagaaagtcaccttagtactgacactacgcgggatccgctaatactgctcagtactttaaacgctcagatactcagggacggaaggcccctcctgccgcggccatgctcatgcttttcagcttattatcttttttccacttcattctccggttttggaaccagattttaatttgtctctcggagaggcaaagagcatgtgctatttcaatcctccttctgcgggtcaggtaacggttgaagtggaactccttctccagctccagggtctggtagcgcgtgtaggccgtccgggcccttttgccttccgggccgcctatgttgtctgcaatagaaaagtcagcggtttagccaccaactcctgtcttccaaagtccgccagggggacaagcttgggtcatgagcagggaacccaggcgaaaagctcaacaagttctgcctaccagcccgcacacccctcccgaatttccttctctcttcctttctagaaagaaaacaatacgatttggaccctgggaacaatctgcccatctgaggctggggccgtgtcccggcggactccggctttccctggcccctctcctgccccctccgccctgccccgggcgccccgatcgggaggcacagccctcccaggctgcccaccgcacagaaacccaggaagcaaggccctttcctgagcgcccaagtggccttcgggtcaccctccctcaaagttccagccccgagagccgcctcccgtttccagcctgcagggttggggagcctgttttctttttcttccctttccttctctctccctcctgcccccaaaattcagaatcctgcaggctctcgcctcgattctttcccccaagccccttttcgggggctgtaattagtaacgctgtttccccagcgtagccctcctcataaattatccgccgtgacaagcccgattcacggctgctacagccatcctctacctctctgcgccttgctcggctggcctgacccgggagcgcgtcccaaggcgtggggttccagaggggttttttgcttcctcccccttccaacgtctaaactgtcccagagaacgcccatttcccccactatttgtgagcgcagggtgctcgcaaagaagaggaggaaggaggaaggcaggggagggagaacggcaaggagagctccgcagggctgggagaaatgagaccaagagagactgggagagggcggcagagaagagaggggggaccgagagccgcgtccccgcggtcgcgtggatttagaaaaaggctggctttaccatgacttatgtgcagcttgcgcatccaggggtagatctggggttgggcgggcggcgccgggctcggctcgctctgcgcactcgcctgctcgctgctggcaggggcgtcctcctcggctccggacgccgtgccaaccccctctctgctgctgatgtgggtgctgccggcgtcggccgaggcgccgctggagttgcttagggagtttttcccgccgtggtggctgtcgctgccgggcgagggggccacggcggagcagggcagcggatcgggctgaggagagtgcgtggacgtggccggctggctgtacctgggctcggcgggcgccgcgctggcgctggcagcgtagctgcgggcgcgctctccggagccaaagtggccggagcccgagcggccgacgctgagatccatgccattgtagccgtagccgtacctgccggagtgcatgctcgccgagtccctgaattgctcgctcacggaactatgatctccataattatgcaactggtagtccgggccatttggatagcgaccgcaaaatgagtttacaaaataagagctcatttgttttttgatatgtgtgcttgatttgtggctcgcggtcgtttgtgcgtctatagcacccttgcacaatttatgatgaattatggaaatgactgggacatgtacttggttccctcctacgtaggcacccaaatatggggtacgacttcgaatcacgtgcttttgttgtccagtcgtaaatcctgcctgatgacctctagaggtaaactcgtgcactaataggggagttgggtggaggcgaggggggtggcgcgcgcgccccgggcgcgtgcccgccgccagttgccgccgttcagccggactcgagcgccacccgctggaggcagggctcatcgcccagcttccgaccgggggctgcaagggccggggtcgaattgaggttacagcccattatggcaaaattattgcatttccctcgcagttccattaggatgtaccaattgttaggccgtcagctgccgatcgcgcgcccggcgaggatgcagaggattggggggaggtggtgacttgcattttatttacaacaactttatttcccccgttttgcagcccctcttatttttgtgtcgaggttggggtcggtactgaccgtcctgccagcagctctgaattttgaaaatacagatatcaccttcggggaagggggaaagccatttagccaattggagaaataaatcctgcccgcagcagcagcagctacaattacggctctgtttttgcgagcgcatgagggacagtgtccctgccgctcttaaatgacaggcgtctattaaagatagcttttgtgtagtgtttctccaaggcgaggtcaaattccatacacttttataaccgtagtcgatttttctttcgtgtgaatatggttttcgtgtcattagtttgcgatttgatttgcttacgtatccagcctggaaaatcttcatcacagggtccggttcctcgagccagccgggccccaagtcggagggttctccttgaacccagcgagtgggcccaggctccctgcagccacagaggctgcctggggtctggggatccgtggggcgggttactggggtcttgcttagacctccaggagtaaaatgagggcgataatggaagcattccttggcagtgcctagtatctctgtagttattttccacggctccgaaagactcaagtaaatcacaaatatagctgagaggcaagtggagtctccccgctggaggcccggcgttgcaggcgcccctggcacgtctggaagccaggactctggcggctcccatggccctgggcccctcgttgggtcctgaacgctgctgtggcggcgacgcgggcgctatcggaggctgggagcgggaatccggagccgggagcctaccccgggctgtaatgttccacccgcgcccaggttaactcgcctcggctgaggctgcttctcttccactgacggttgcacacgcgggaccgagagactgggctctgttggggccccctttgttcctcgagcttccttcctgttctgggaggcggcttgggaggccgcgacaaggccgggctccagctcttagaccccctctttccactggccagagatgatttgatgatgcccttcgggacttactggcgagggacttaggcagagacgcccagacacgaaacggggctcggcccagggctctttcctccccagcagccccgcgtcccgaggtcggggagctcagagacactagcacaggagccccagacgcattcagggcgcaccccagaactccggagccggtttgggcatccttgtggagcgggactgggtgtgtgcagtgcgccccgctccaccgctggtattggctgtgtgtgaggttttgttttgttttgttttgttttgttttgttttgttttgttttgttttgtaagaaataaatgcacagacgcttgcaaagctccgggctcccctgaagctgcggaagcccccagatgggagcaggcggggagaaaagttggggaacaggcgagggcaagggggcaaagccgaaggaggttgcagcgctggcctggtccctgcccaggcatctactcgcccgcctttgcctctgagtcctccccgctgggctgcgtggaattgatgagcttgttttcctttttccacttcatgcggcggttctggaaccagatcttgatctggcgctcggtgaggcagagcgcgttggcgatctcgatgcggcggcgccgtgtcaggtagcggttgaagtggaactccttctccagctccagtgtctggtagcgcgtgtaggtctggcggcctcggcgcccatggctcccatacacagcacctacgagcagaaacggccgggcgccggtaagccagggcctggagggttgacccagtcagcccagtgcctcccacaagaggcacccagactagaaaccaccccgcctccactccagcctctcccactatgtctggggcccaaagcatactgaatgggagattatttcataccaagcgagatgttttccacctataacgacttggggtggacattatcgtttttgaaaaatctgcctcataggaaaaccattacaagcaaaataacagaatgagcattcttaatttgggatgcccaggtcgtgtttttgtggggatgcagggtgtgtgtgtgtgtttgtgtgtgtgtgtgtgtgtgtgtctggggtgggtggtgtggaaccatgtaagtagtgtacacactctgaattcatagtggtctctctgaggatgctactgtgaccagccatgtcggaactcaacacattttttgaagagttaaaaatggtcagccctcttgaatctttacacattctcccaaattatatgacccttctgagaaatgcagaactcccccaaggataaagtggatgttaatggaaaacattataattttaacaatccgcattaggctctgtcctagggaattcctaggagtctttgggattccctgtggagtccttggaaaccagaggctaagagatggagctataggtagtctaggatttctggcaatgtaggattgtgttgggctgtctgatctggtgccaaagttccccaagggtggtggggggtccctccaagacaggtgtatgaagctcaggcatgggctcagaagagggcagaagttggctaagagtgggcagttgagtagaagccgggggagatgagggaggagagagaaaaaaatcctgagtctggggctgtggccctccaaggctttggggagacactggaagaggccaaatggccacctctctgtacgggtttctgaagggcagaaaggagagggggttgggaagcaaagggtatttatcagtgacgcagtgcaaaaggccctctggcttgggaagctgagcagggtactcagggtgcatggacaggctgtccctccccaccagcctctctctctcttcaggctgtccctgtcacaggtctcatatacgtgccagtgcccccatcctcccctaaggtgtcagcttacatggacactggggccttgcccttcctctgccatggcctgatagccccattgggaactgattttttcttctcttttaagaagccaaagaaactttgctggttctttcatcctttctttctctctattcctctttctactctgtttcctccttctttctttcttttcctgcctcctttcccctctccctccactgtcttgggatatgtcttacccgcgcaggagttcatccgctgcatccaagggtaaaccgggctcgtgtacttccggtcggcgccttcgtcatggagtgctttgccctgcccgctgctgctgtcgggtttgtactgctgctcgggagaaaagtgcaggtagtccccggggcccctctgcttgccactgcccgagggcgaggcgccactgaggtccttatcagaatagaaacacgaggccccgtactcgtaggacgcccggttgcaggccaggaccgagttggactgttggtagaaacaaggtgaggtgtacgtcttgtccgggagactcgacgccccgtacgaggccgggaagggcctcagcgcgtcatagccagcctggtagaggggcagctggcccaagaaggagtcctggccgctgggaaggctcccggggaaagtgggattcacaaaataggaactcatttgcgcgcccctctgcaggactgtgatttgttgtgtattagtacatctggctataactattagtagtcatcgaactggtttgtttctggatggccgaacgccaaaagcgacagcagcaaatcgcaccagctgacgcggcggcggccaatgggagcgaacgccggagcccgctccccggggaccgcggcgaccgaggcagcaaagttacaaacagcccccagcccgcccgcccgccgcccgcccggcagattaatgggcgcgcacagctagccggcccggctctcttcccgaacgccagcggcgggcacggccctttcagtggcgagcagatcaggccagagtagggacactaatgcttgggccgcctcaaaggccccgccaggtcccctccttcctcctcccctttttgctttattgaattttgcgggttccccgcccctcctcctccaaacaggaaacctgaaggtcctgctccaggaggggcagtgacaaaggtggctttgctccctgccggcctgcactccaggcacggcccagagttgcccctcccctagcgctcccctattcgtgggtgcgagttcttgagctggagcaagggccatgagaaaccaggccttcactctatgctcttcactcgtgcgccttaggaatcggtgaactccctcattctctccttctccgctagcaccaggggcctgggccttgcagcccagagctgaaggatcacctcgagctgaccaggactcagccaaacgtaggttcttcccacccattccctcctcccacatacacatcctgtttgagtcccaaggggctcaatggcccgcgcctgcctggtgtcaaagcactccttccagctgggcgtccccatcccacctttgaacccagggaattgaaaggccagaaaccactggtttcaacaagaaaggaccgacagagcagtggccgtgagactgggctcctaagacagccgagggacctgctcccctgcctagcgcctggggactcagcatccactgcgagaaccgctcagagctgaggcagataaaaatccagatgtggaatctctctgtccacattccagaggcacagaagacgcagaggccctggccaagctgggcacagagggcagctctgcagggcccaaggccgcgggataattgatgggctcggtttccggggcgcccgacaaccggcactgtcctggggccgccctctttactgcccttcctgggaccgcagggagggctgccgcccctcagtcgctccggaaccgggaatagtctcaccggctccagaaatcctgaattgctttcactgctgtcccaggcctggcggtccccagacaggacattaaaagcctgtcctgagctgctcactcttgcctgagaggtgtgccttcgagatagttgacttttacaacacatggatcaatctcgttttgtaaaatgtgatagcagcccaatggcatttttacaactgtgtttgttgggcttgtaaaaccccttgaattagctttaaaatcctcaattctgtggaggttgaagaaagactatttacgtgatttggatggatttctggagactgtttacaagatctgtaaaaccctggccaatgcaggctcacccggttcaggacttagtggggaggtggcaattggcagtgttccagtaggaatctagtaatgacttagtctcttccttgcttttcaatttttttcctgaactctcctcccacaaagggaaaaaattgggaaaggactggcctaaggtcgacctccgaagagcccaagaggcactcctggaaggcggctgctagcccggcaacgggggctacccctggaagccggatgcctgttccccagtcgatccgtcctggaaagggtttactttgcatataaagcagggcctcgaatgagaggatagaattgggcatttcccacacattacttcagggaaagaattcaataggtgaaaatgaaaactcgagtcaaaaaattaaaagggacttttaaaaatagctgtttgaagaaaaacatgtttgtgttatttttttcttaaacaaaattatcagacaacagtgattttaagcaagttattatttaaaatgaaaacaaccgtttggagatgacaatcaatgtttacatttatgatttccttttcattccgccatgtcccacatagtggtgggtcagtgtcaatttactattattattatttgtcatgccttgaccaggattctcgatctaattattgttccagctaacaagagaatttgatttctcagctaagaaccagaaaacattatatttctagcttctataggcactaagatggaaaaacatatattacattggaatctttacatgttagccaaggctagtgcatatcatttctccaaccagatattctctctctctctctctctctagagagagagggctattccggcaagaataggcaccccagaccctccaaagggcctctcctgcgatggtgagaatggccaccccagggctctctctcctccctgccaaagccacgcagaaagcgacttacctttcagtttctctccaaggggggcaggacggcgagctgggccccactgtctgcccttgccctgggctgcccattgaacagctccacctctgccagcctggagggtggtctgggagtatgtaggtgtgggaccttgaaggccacctcggtccagccagctcgctagcccagaccagagcccaaagcacacaggtgcggcctctgcccttcacagccctctcctggagccaaagccgtccttctttgccatagccaatcctcctcagagcagccaggcctacaggcctcaggactacaggtagtctctccgattgcagaatcccaaagccagagtgttccctgaaccagcgtgcgcccccagaacgccttgggacgcgcagtttggacagaagcagccatgacgtgccaggcggcctgtgcaaccagtctccatggtgctggagtgggggtgggggaggacccgagtctataacggcgtccagctccggtcaggggtagccgaggcggggagatttcccggccatataggctctgggtgatcgccccccaggtccccttgcgtccccctctaccctgcttgctgggaaatctctgaggggccagtacagcagtcgcgccaggctgcaagaggcgggctgcagctggcgccggtcccggcgacggccacggcgtggcagcagcgagcgccagcacggtcgcaataaataatcggcccgcggcagccgcagtcaggaaggcggcggacctaggatgcaaatgcgccgctttatccgccccgagcgcacgcagagcacgggctaacgtcctaaacatccacagccccttcctatttatcgaatccataccaagatattgtctcaagttggggaaacaacaacccaaacaaaaaacaaacaaaaagaacctcggactcttttcttgtcgctgtccgaggagttctcggggcaaatctggtctgatgtgcacttaggccgagctacagttcgagccaccgcgctacgcaaagccaccgccagcagcacgctctgcgcttcctcccgggcagctccaccatcctctccccgctcgcggaaggtggggagtgcggtcgccagtccgttgcgccaaggtggattggggggtccccctatcgcccagactcggtttgcgtccttccttcaaccttagctgcgggaccctgccacgcgcgctaacagcattatgtcctctgcaccgaaacttcccaccaagtaacacccaattaatcccatcctctcctccaacacagaattccacccacgcacctattccccctcccagcgcttcagacacctctctcatcgaaaaaccgggcgaagggaagccggcaacgagcggagaactctggctgaattagtaagtttttctgtttcccccttctacctttctctctgaaaccaattcccacggagtagaaagtgctgtgctgatgctaataaaatgcctgtggattaatgcactttgccctcacctcttcccaccttcccaggtcaaggatggtctcctcttgttggggaatccaacaaaaccaaatagggccatgaatgaaaacacaaaaatccaaacccaaagggctggcggggaacacagtgtgccgggccacttccttttgggcttcacggggtcgctagggaaggggagagagacgacccaagggatgctgccctgtgccttggcgctgtgccacggagggccgaaggaaggcgggcacttactgccaaggcgagccagggaggggagagaaagggagtggtgtgtgtgtgtgtgtgcgtgcgcgcgtgtgtgcctgtgtgtgtgacgtgtgtgggctgtagtgtgtgatgggggcaagtgtgaatgggtgagtatgggtaagggggagtatgcccctcttaaagcctccctgggtgccctctcccaccgctaccgccgccggctgtcgcctcaccacctttgctcctatctcctccccacatgtctcaccttcagacggtggctcccagaagctcctgcccctctgacagctgtcgcttgggcagcccgagagaagaattgtcctctttcctggtgccagaggacgcaggaaattagccaggttgcgagttgcaaagctgctgccgcggcgccgggaacggagcgcgcccaatctccagcgggagccgccaggcctggcctggccggggcttcccttcgctcgccatctccggacaaagcacagccgagcccggctggaaggcagagctccgaagcaggcaggacggagcggagcaaaagaatgcggctctattctcgcaagggaaattataaaaaagttcatgttcacggttctcatccacatgaccgacagcggccaatggaagggccgaacaactcataaagttgtattgcaaagttgtaaattttcataaacaacaacggatttatgaccctttccccatcactgagaggaggcagctcttacaccggcgccatcttaccaccgaggccgccccgacttggggcctcaggttttacagacccttttgggccaggttttactaaaagagccataagaagcgggcccagcccaggcaggagactggagacgaggtcttgcaggcggaactcaggatgctctgagctgcccgcacaacccctggaccttcacccctcgccccttccccgcatccagctgccccagcccctgcccaggctgcgtagcctagcgggggtctgcggtcctagcccctccccgcgccacctactgcagtgccggaccctggggccccctcgcctggtctgcaggcggggtggggaccttaaatcccatttcctagcctggggctgggttcagggcgcatgcgaatccggaatcagctctgggtaatgcccctttccaagcccactgctcagccttagaggaaagtgtggatttgaaatttcctcatggaattgatggaggtttttaggtagattcatagaatataacgtatctaccaaagattccgttttcaagggatctagaagatgttagtgcacacgcaaaaaccagacaaacgtctctacacggataaaggcacatatacaattatgcacacagggaagggcatacactctattgtgggcacagaatgacatgcaattatggacacacaaaaacacatgcacccaattatggacaccaaaatatatacaattgtggaattaggtaaaaacacacacacagaaatacatacacagaaaaataagcacatactcatacaaatacacacataaaaatacattaaaaagatacatgacaccaatacatgggtacccaacacttggaccatcacaaggacagccaccccacttttgcttccccactgccccctgccctccagccatactcacctcccctttcccagtcccctctggataaggcagtccacatttttctttgtcaccacgcatctttattttcggttacataaaacacagctgggctgggaagtgtgccttccctgaaccccaggatggagctgagcagggtacaggacaacacaggagatgaagggcattgcggagggcattggacctccccacccactacagttaactcaagacaacataccatgctacaaagtcaccccattaacacatcctttccaagtcaagacactgccttacaaatgaactccaagactatagaaatgataaaaaaaaatcttgttcaaatatacagtatctgctattataggaaacatcagggcgtacatatttaacacagctgaacagtaagatacaggagccagaggaaaggacagcgaagctggaagcatctccacagtcctgctaagcagaagctaacccacagatctgcagccagctcaggaacattcccctccagaagtgggggttgatgggcctgagctgtgggtgccaagccagagaaggagggattgattctagggtgcaagcacttaggatgctttttggaataaatatattatttttcgatttaaatagatgccaataccctgatcctggacctcagcacattctcagggcagcctcagggaccccaaaagctgcgggctgtaagcagcaggggacttgcctgggagcagtcggcactaggtagcaggcaagccagccagcacaaaataggtagttttaggggagtaggtagtagtgagattcactttcttgcgggtctgggagggtggtgctgggtgtctgccagtgttgggatacatagggacttcctgggaatggaggccctctggggctggatacataggtagtttgggggtgcctcgagcagaggcctgtgctaggtagtattttggacgcgccagagcagggccggctggcctggggttgggggtgtcttttggggtcctcggaggcagagggaatccaaggcgacccagtctctgcggccgctcagtccacaaaagttgggagctggagtaggtgatgggggtgggtagagtgcaggttggggactgggttgcttttttgtttttgtttttgttttttacattttcttttatttttcccatttttgtaagtaaaaccagtgagtctcttaaagacgcttttccgactgtccggtgcagagagggccccggatcggcccctcattcctcctcgtcttcctcttcttcatcatcgtcctcctcgtcggccttgtccgcggcagcagtggcggcggcagagggcacggcgccctcgggagctgcggcggcagtcggaccttcgtccttatgctctttcttccacttcatgcggcggttctggaaccagatcttaatctggcgctcggtgaggcagagcgcgtgggcgatttcaatgcggcggcgccgcgtcaggtagcggttgaagtggaactccttctccagctccagcgtctggtagcgcgtgtaggtctggcggccccgcttcctgtcaggtcctgagaacagacatgcagacacatgaacacaaggacagacaagtagacagggcactcgttaggctgctgtcccagagcccgcaccttcctcctggcctagtccccagcgagcatccccctctgccccaggccccgaactgagctaggggaggagggggagtgttagggaaagaccccaactgcagtgccagacgcgcaggcagctctgtaatgagcaaaggcacagaatctcaactttacaaccgacctttccagccggctaagcttccacaatgtcctgcttcctctgacaaaggaaaactgtaaatatagagtgtgagcaagtgggaaacgctgcacttttgccattcaaagatgagcccggccattcccctgccttgctaggcaagtgggcgactcttcccagcagcctgagccctcatccccaggaccttcctagggcaccccgaccctctgtcctcattccctcgcccccatcttgaaatggaccctggcacagggtcgggtgagaggccctggagggcttggctctcctagcttttgagaaagaaatgtcaggcagcaaggaaaatgaggagagagagaagaagaaagggagggagggtgacagaggagggagaaagagagacagaatagcgaacaaacttaatgttaaaattccaagacaaatggagttaaataaatttacgaggatcgaacccattaattgggccataaaaagttttatgagcctcatttacatacaatgctatgggctccacgcaatggcgcctccgctccaattaaaaccagaaaggctgcgccgggagtcacggggctaccggctcgcaacagcctggctccgctcttccggccccgcgccccgcgctccgcgctccccagcgctgcgctccccgctcccggtcccgctccgccagcctggcccgcctagcgactgcgcctacctgaagaccgcatccaggggtagatgcggaaattggcctcagccgcgccatgcagcgcgccctcgtccgtcttgtcgcaggcgcctttggcgaggtcactgcagagcccggggatgttttggtcgtaggaggcgcagggcaggttgccgtaggcgtcggcgcccaggccgtagccggacgcaaaggggctctgataaagggggctgttgacattgtataagcccggaacggtcgaggcgaaggcgccggcgcccgccccgtagccgcttctctgtgagttgggagcaaaggagcaagaagtcggctcggcattttggaacagagaagcccccgccgtatatttgctaaaaagcgcgttcacataatacgaagaactcataattttgacctgtgatttgttgtccggcagctttcagtgtcggttttacgaggtagagtgatatatgataacattacacccccagatttacaccaaaccccattttcttttggacggagctcgccgcagcacgtgaccgcccacatgaccgcctccgccaatctcagcagtcctcacaggtggtctcgctccgcagggcccgcagccgcctagaatggaagggcaagaggctcaaatatgcggccaaagaatccgcccgcgcccggcgggcctggcgcgtcccgcggaaaaagacctggaggctccgcgggagcgcccagctggcggccaacctccgcactggggtctgcggacgccaggcggcccggccccacgcagcaccccccaccccgcccccccgccgactcctgctagtgagccctggaccaagcttgggatcctccccatccctctcctgtccgcctgcccagaccctggaagggtctctgtcccccgcaacagcctgccccgcggtggccttgtgggcaggactcagctatgagcagatcgactctgcccaagtcttctctcacccaggtccagtgggcgacaggccggacttagactcggatccagacggggaaggcgcagcatctcttgcagctgcagagagattgccaccgcaaactggagccatgtggttcgaataaagtcaacgtctcccagcttcctttccttaatcggaggcacactgtttatccgccctaaaggaagcagtgaaatatttatctattaatgagactcatttgccaacagatttattaacgtggggttcccctccctcctcccggacgctgtagtgctgcaggctctgtgccttcgctcctgggcacctggctggctc

SEQ ID NO: 261 - DNA, 20823 bp, Homo sapiens
  source 1..20823: mol_type = genomic DNA
caagcccccgccgattccttgtttcccagcgaggcttctagccaggcttgagcagcccagaaaatatagggcggctgttcactaaaatctggggctcccattccagaaaggctcgtgtcaagtcgacatcttaggaacttcacaagggtcgcggaggcgggagatggcggcgcggaagcctcttgcatggagccacactgccatctgctggccgccgtttggtactgcagcctcagctacctccgccggcctgagctttgggagccgccggctagcccaccgcaccccactcccaaacgaggggcgtgggcctaggtcccggggagtctgcgtggagcccggaatctactgcagaggaggcaatgccaataaaagaggtgtttccgcagccgctttatcggcggcagacagaacaaatgaacaaatgaaagggctttggtggaatatcctaattggggctggacagttgtaaactcattaagggacgaattccagacagttcgcagacccggcctttatggcacactcttactgcctattctttgaagttccttctgtctgcaacaacagagggcgtcccaacctggcggcggggtgggggtgggggttaggggacgcctcatccacccgcgccctggttccccttttaagcttagaacacatccaactttgcagaagtcgtggagtgggggaagggggtcgggcgagggaagcaagggggtggaagcgaggccgaaccctccggccacatctggaaagcgctcaggcctccgaagttgtggccgttcccccccccccgcccctcgtagccctttacaccccataaacggtaacagccctcattttcttttatggcgcttaggggctcgtcaattgcctcagccctgcctctgttaggccttgtgctcgagaggtgcttgcagtgcaggacccagattctcttgggccaggctggcaggactccgcgggggtggcgggcggtgcgaggatgcagggctttgttcctttgcaagcccccaaaatgtttgcctgcatggccacgttgggccggtggggctcctatttccctcttcagagcctgcttagaaggcggctcccagctctctatcctgtcaccctctcccccttttcctcaccaagctaacgaaggcccaggtttgggaattttctcgggggcaccaaggtgagagtggtctttccactgctactggccagaccagaccagctcctcaggggcttctccgccgtcccgcacatagacacaaggccgggagcctggctcctccgccgggtttcccagctttttctcgccgccaggcagctggcctgtttgggagagcttagctcggcggactggttgtggcaggtcccgctcctgaaagccagccagaggcaaaattggggctctttctcaccaccccaacccgcccctacccagagactctacataggctcccctgacccagagaagaaggtgcaaagagcagacccgcaaaaaatagaaaagaatcaatatattttatttggcaaaaagttaaatatcatctcaacacaacaatttggtcagtaggccttgaggtaactattgcaaaatatacagtgtaagttcagtctgatggaaaccccagattcatcaaggatacaaatctacagtagcccaatggcggtttcatagtgtataatttattatcaataaaattaactccgttacaatcagcattcatttcctccaattaaaattaagcataaaccctaggtagtaaccttctgcacatatgtatagctccgaatttcctcactgttcgtctggtgcaaaaacaatattcaagcttgtctgattatgcatattttctttaatcatatagattatatatacaatagacaagacaggactatatagataatggacagacttaaatgcccgcatttttaaggtggagaaaatgatgaatctatgcatccccgagaacacttaaaatttttttttatttcactgggaaattcttacagctactttacaatcataggttaacagcctagttatacagaagacatattccactacagagctatactctatgcaactgtttttttcccctcataaacaacctgagttcaaattgaattctatcttccacaatcacaatgggtgcatcacccagtacacagaagtttgaatcacaaaacataattaccacaataaaacacagtgttcaagtatcttggcagagcaatctgccgcacaaactgcaaattaaattaactacacagactaaaaactatacagcctaccatcaacagttgtgcattataaaaaggtagtttctttccttttgttttaagtcaggaacaggtagatttttaaaaatatatatacaagctaacacacacagctatcagcactaatgcccccccctcaacttttcctttttcttatagaaaatggaaagcttacaatacctcctccatcaaagcggcaggcctacgagccagcctgaacagggtttgccttggaaaagatgtggcctgaggtttagagccgctttgtgcggggatggtggaggctagggtgggggtgagagaagggagaaggcggaagggggacggacagttctttctttttctctctagcttacccttttttctaaataagcccaaatggcatcactcgtcttttgctcggtctttgttgattttcttcattttcatcctgcggttctggaaccagatcttgacctgcctctcggtgaggttgagcagtcgagccacctcgtacctgcggtccctggtgaggtacatgttgaacagaaactctttctccagttccagggtctggtgttttgtataggggcaccgctttttccgagtggagcgcgcatgaagccagttggctgctgggttatctgcggggaagagaaacactgggtttaggagcagaagacgcacatcccgctggggcaaatgagcctcctgcatggggtctctggccgaagtgcagaactctgctgaactggttaggaaaggcagtcaggcctcggacacaatggaaccctggcagacagacgcacagacagtcacttaaaattgcacgcagtaaaactttggctcgccctcccctccgagaccttcctttctcctactctgtcctcttgtcccccttctccttcctcccactctcaaaacgctgtatagaatgaaatttggaaacaggtctccttgccacgcagagggaaagcatgctgccttgtgttctgtagcaagattaggattcctctgtcccgttcactgacttcgtctttctttcccaacctgtccctctacgccccccactccttatttaaccttcctggaaggccttcggagctgggcaagccgtcagggcgccctaaggccgctgatcacgtctgtggcttatttgaataatctgtcatggggacccttgtggcccgggtcgcccgcagcctcatcttggcaggatttacgccgccactggccgaaggcaagaagtggaaggaatcggccgtctcccccagcgtcccagctccggctgccctggctgccgccgctcacggacaatctagttgtacaaaaggctctctgggctgcactgctttcgaagaacggcccaaagtatctcggtcctgggcctgggcagccaaggagaggggcggccagtcttggctcgtcccgaagtgcccgccccgccccctctcgctgcagcagccgcctcctctcccgtagccctgcgggccgctcttcactgctctccagacttggggccctatctgaggcgtcccaaacaccaacttctggctcctggccccaactcgagaggcttccagcgaggacgaaggcaggctcgagagaaacctggcgggccagcagatccgggaggccggcgtggaggcggcggcggatttgaagggaggagacacttactgggatcgatggggggcttgtctccgccgctctcattctcagcattgttttcagagaaggcgccttcgctgggttgtttttctctatcaactggaggagaaccacaagcatagtcagtcagggacaaagtgtgagtgtcaagcgtgggacagtcaccccttctggccgacagcggttcaggtttaatgccataaggccggctggagggcaagcccgcgaaggagagcgcaccgggcgtgggctccagccaggagcgcatgtacctgccgtccggcgccgccgccgccacgggcgcctgggggtgcacgtaggggtggtggtgatggtggtggtacaccgcagcgggtacagcgttggcgcccgccgcgtgcactgggttccacgaggcgccaaacaccgtcgccttggactggaagctgcacgggctgaagtcggggtgctcggccagcgtcgccgcctgccggggaggctggcccagggtccccggcgcatagcggccaacgctcagctcatccgcggcgtcggcgcccagcaggaacgagtccacgtagtagttgcccagggccccagtggtggccatcaccgtgcccagcgcctggcccgcccggcccgacccacggaaattatgaaactgcagatttcatgtaacaacttggtggcaccgggggggaagtacagtcacctaataagttgccggcgcccgcgcccccattggccgtgcgcgtcacgtgcccgtccagcagaacaataacgcgtaaatcactccgcacgctattaatggtccgatgttttgcagtcataatttttatagcaaaagccatatgtttttatgtaaagggatcgtgccgctctacgatggggtttgttttaattgtggccaacgacgattaaaagatcaaatctagccttgtctctgtactctcccgtctccccccccatacacacacttcttaagcggactattttatatcacaattaatcacgccatcaagaaggcgcgggtcccgcgtgcgagtgcggccagcggagcccctcacataaaattagacaataattgaagccataaaaaagcagccaaatcgcattgtcgctctactgtatttaaatctatatttatgatatttcataaggagttattgtttcagaagccacacaggctggcgggaagtcggaaacgaccaacagattcgtttgcctcgccgtggctcccagctgtaaaaatttacgaggacttggaaaggttagactgttgtgtttggttggcgagctccctgtaaataatccctgcggtccccgggagaggcgagtttacccgcggccgccctcgaaaagtcaaattcaacgcaggatccgtcccaaacggagccgccgccggccctaccagggcactccaggcagggaccggccgctcagggagtaccgcgggtgtaggtccccacagctacccgcctggagcgaggggcgcccgggcaacccttaaattcgcctttgctacgaggaccccacggaggagctggccaggagggagcggccagccgccaccagggcgaaggttttgagggcctggttggttgtgcggcgcgctcggtccccggccctcgaccccacgcacacgcgcgcccagcccgcctttctcatcagctggcaatcaggattcccaggcgcaggcggctggcgacccagccctgtgctccagcctcagaggctctaaccatgagcgctgcaagcctggttgcgctccgtgaatcccagctggggaaaaaactacaagtggcatgaatggaaggcaagttcggtttgggaaaaggcagcctcgcctaagagaccccgcagctccggaacctgggaggcccgcaccgatgtggcctgtcccggggccgcgtgagcctttcagggctccttcctccctttccagctgctactccgggcctcgccttggttacctacggggcccggagactcggcggagaggtacaaggcccaaagagaggcagccacagctcaaggccagggctggaaattagaacggggaggggtaaaagggcatcgactccagtcccattcctgggcctggccacgttggggaagtttatttctcacccgttgggggtaaattaaaaggtcgccgccactccgttaattggaaggaaactccccctgcccccaattcctaacagaaagcagcgactcctagaacaggggtaatcaaattcacgtgtggatactgtgcctgcaacagtgtgtttttcattagcccacttccctggcggcgaggctggcggcctcgggcgcttccatctctctctctctcttttgccttcatcctcaccagcagttccagtaatccccccctcaaacaccctgacacacttccggctgggactcccaaataccagcgaggctgccaagccgcgcggataccgactgggtgccccttcctgcacccgcgcctggaagagggaagtggccgacacaatgaactccgaaatggccccgtcctgtccgcctcatctccctccccctaatattttccttgccccataaattcctctaggtcatgcccacccccaccacagtccaccgtgtcctaaataccccgcagtccgccaggcctctgagattttcatttaaaaaattaaccctggaggaaaccctggctcccaattttaagtgtctgcaaatgggctgggcatgtctggatgccttttccacgttttatgcctgagaagacactgattatttcagtattttttaagtaaaaaagctgttcctttaaacagccttagccccaaaataagagagttactgaacaattagcaggcgttgagtgttaagcagatgttactggtgcctagaaagcggagaaaaatcagaaaaccaaatattgtcttccttcagcccaaaggtttggagccagaatagtctgacttttttgtctgcttttattttcgaagtgaaagagattgcgtatgcataaagaaataataaatgagtataatttaaagcggccccttctcgactgagatttctgaaactgtgatctctgaaataaatccaatgccctggtccagaaaatggcagggaggagttgaagggaatggggtgtgtggtcctttcagacagcaggtcggtggctgtgcaacgaaagagttcctgggcctccagtccaggcagggaaaggaaacagctttgtgggcacgaatctgtaactgtgtgtgttgggagtagggagagatagtttgttttctgttttctgtagggaaaatggtcagactggctcccatctgtagactacaatttggaacgatgactcaagtttatatcaatggctctggaatttgggattctttttgcccatttaaaacatactggctcttggaagggtccccttctccagcacccagctgcacaaaggtgctgtatggaacatattttgtacctaatggaagccactagtaagcaagcagtcaagctttgccctagccagtctccctcaatgcggtcaaaccccaagctgtgaccggcaggccgggaagagccagctaagagcttcccagcgaatggccaggctccagcgaggctggttgggcctcagctccagtccccagtgaggctggcgaaggcctccctgccctcgatatgggcacacaaagctgcagcgaatgtcccctaatcagatctcctagtcagccgttagcgacaggcgaagaaacgcaaggctgccgccatccggtcgtgatcataaccgaggccttgtctgcagagtaacacaccaggcccaaacccaccgccctcggcagccgccccacgcgggcccttcctcggcagacttcccaacctctacttgagccgcagaggaaagtgagaccccctaggctctcctgaagccagctctgggcccctccccaaggatgctttgggaaggagataaggaggtgagatagaatctggcagagacggaagatgaaaaaaagaccaacggaagaaaagaaagcaggaaggagcaaaggaaagaagaaaaaaagaaagaagagataaaagaggaagggaagacagggaaaagaaggaagaaaagagaggcgactcctagcagcggccgagcttacagagagaagggtaagtgacaaggccaggatcccagcctgccctatccttcctagtccagcctgagtctccactggaaggaggttctttcctgagctcacacccgggactggtgtgtgtgtgtgtgtgtgtgtgtgtgtgtgtgtgtgtgttccagccttacaagagaatggcaggaggtccctgggcaggcgcaggcctccagtgggaggctcaggatggaagcgggcgcccctgaccttgaatggcccaaagcccagaattcctaccacgcccccggcgtccgcgaaggagcagccaacctaaccctacctgctgtgaccaggtggaggtgtgtggtggaaggggaaagccggccggctggcaaagcgctgcggagaaagacacgaggctcctgagcagggaaagccgaggttgccaccgcaggcctggcacgaccagggccgtgatgccccgcccggcccgacccccgcgcgcagaggtacctggagacgatttcaactgaagtaatgaaggcagtgtcgtgctgtcgagagaaaggtggatcccaacaacaggaaactacctaaatcaccgaccagttctggtgctgcccgcgaagggctgcctcgcccgccgccgccgccgcctccgccgctgccgccgccgccaaggagagaaccctgccatcgcgcctggcccggcccagcccagcccctaggcaacctgcgcccgccagtgcaacagagtgccccaggcggccgcaaatgcgtcaaggaaggggaagccacaggccccagtaaggtattcctgggagggagagggaggaaaagagagggaggaaaggcagggagagaggaataaaggcggggagcaggcgagacgagagcagctccgagaagcagtgtgcgcgccgctttcccaaatcttgcagcccagcgagccggcgccaagaggcggtagccgtggaaggctcgaaagcgccagggacggtacagatcccggctccctgtctggccccggcctcccgcctctcgctctccccctctccctcctagctgcccgcccgccggggcgcgcgctcctgcgccccctccccttagcccccgccccccccactctggcaagcaggaaacgcgtggccctaaggagtgccgccaggtgggggaggccgtactgggggagggggaggcccccatgcagtccagcccgggtccacctaaccgctgcctccagcggctagagatgcgctgtgggccaggcctgctccccgattcagattgagggtcatctgtgacccagacacccgcaaaataaccggcctctgcaagcctccctggggctcccgaaagaaatcctgtttggcttcctctgtctatgtagctcccctctcaactgaaatcactggtccaagacagccacaatccagatatactagcaagccataaaactgaacaaaagccgacaaaccttacggcaccagggctatagggcccagacaaattacgaccgtctaggtaatatttaaatagatgcctaaagtaattgcaggggctcgggttagtcctcctgttgtaaaagtggtgaacgggataaagtggaaggtgaagataagaagtcaaaaaagaggtaaaattaaaaagcttcattccacagcttttattctataagaacataaacatcgtctttttccacgcacagcagcaatacaatattaatttattctgatttaagattagaagtaaatagagctagaactaacatttataataacgatagaatgcatttgcttaaaacaagattggcaattcttcataataatagacatttatacagatttgtatttatagtttttttctttttctgcatctacaggtttgacccttttatgcatgtaacttcacagtataaaggaaatccaaacaatgtctcccttctctagtttattccgcttaccccagtcctcctaggcttctgtgaatttcagaaagcaaaaacaaacaaaaaaaaaactttttgttcaaggcgatttaaaaaaacaacttcacaagatagggagaattgtggtgtgcttgtcacatgttaccagtggtaacaattttaatgacaaaaaaatccactaattccaaatgcataaacaaaactacattatttatctacagccagaaggatatggaaatttagaggtaaatgaaacattttagtcaggcaatgtaagaccttacagaaactggaagagaagtccccttctcttggtaattctttttttttctttttaaagctgggatatcttacagaggaaggaaaaattaaccttttttactttctttctcactttttaaatcagccaaagtcaagcccgtttgccaacctgcatgtccatgcctgtaagcccttctcttggccaaggaagaaaggaagaaagaaaaaagaaacccaggggcctgtatcccctgattaaacacagcacagcactccaggcagacatgcccggtggcggctcctttgcaccattgacctcaggccagacacctcagcgccaacaatgggacctcggccttccggctaggtttgccccaggctgggcaggaaaccagctcggccgaagacaggggccatttcgagcagtgggaccccaagacagcaaacccagcccagtcaggacttgacacttaggacaatatctatctctatagaattttagcatgatatggctttttcccccagaaaacaacaaataaaccagcaccaagcaaacacaaagaaacaaaaagtcagaacaaaccagccctgcacagatgtaacggcccaggagatggcgagtgtgggagggaggaacagggctccagcacaggtgcgagttcctgggcagagcctgaagacagagggaggggaccagcgctcgggaagtgaaaaaaccgcgtcgcctggagattcatcaggaaaaattaaagttggctgtgagctcccggatccggttttctcgattcattttcttcagtttcatcctgcggttctgaaaccagattttcacttgtctgtccgtgaggtggacgctgcggctaatctctaggcgccgctctcgagtaaggtacatattgaacagaaactccttctccagctccagtgtctggtgcttcgtgtaggggcagcgcttcttccgaccactctttgccgtgagccagttggctgcgttttcacctttggaattgcctggcatgtaagagaataaagaggggatgattaagtcgaggccacacgggctgcccgcgggggtgaattgcctccgtttctcccataagagagatgtcccaagtcacagagaagagagtcgtgcccccgtttttggcttgctgagagcaagcagttcctccaaaagtcatgacaaaaattgagtgggccttcaatctacatgacccttccaatttacatttcccccacttttccaaacacctgttttagcgctaagccgtagatgcttgcagaaggaaaggcctgggagggcaggctgtacatcttgaacttaacgcttttctttgcctcttgccatatggcagacaagcatttcctgtagcccccaggctaggagcgcggggtgcttacttggaagatgggccaggcagcttggctgtctcaccccagggccctgattgcccaagactcgataaggggagaaagaagggcatcattggtccaatggggaaggcaggaaaaaccgattcgggggtcaagggccctccctcaagtttctccaggagccagggatagatagctgggcgattccgaggtccaggggaagggaaatggcccttctctggctctcagctcagggccccccgcttccaggccggatttgccttttcttcttcccgcaacgaagattcccgcccctcagcaactttgaaaaaagcatgggggatcgtaaactcgaacttcgccggttaatgggcttatttattggcgctggcggctgcttattttggatgccttacaaacatccgcgctatctgcgggcgagctactttccctccctccccctccccccgcgtgggccgcgccgcgcaggctgggcagggaccagggctctgggtcctcccggccacaggaaagagcgcacaggagggggcctgctcgctggtgtcctcgtccctagtcagggggagctgaggccagcgccgaggacgtcttgctgtggggcgctaagccggacatgaattttactgcgtccccacgcccaaatattaaaaagcaagttcacaaggtcagcctgcctgcagcttgggccaaggccggccggctgctgcgcgggctcctagttttctgatccttctcctccttgtgtctgcctgtctgcccgcctgactgcagccctctgcagccctgcttacccagggaatccttctccggcgaggctttgctgctctcggaaggggccggggagagctcctccgcggccgaggacgacgcgtgcgcctcctcgtcgccctgcgagcccccgccgctgccgcaagccagcgtggggggcggcggcgaatcgagggctcgctccttccgggccgcatcggccgagccggaggctagcgcgggcgggagatcgaaaccgcgccccgggggctgcgcggggaacgggccagccccgagttgctgcgcgccgccgccgccgctgccatagcccttggcggtgccgtaggcctgagaaaggcggaagtagccaggcactggcaccccgctggaggtgcccagggcgcagccgtcgggcggcgggccccgcgggaagggagccagttcggcggcggtggccgagactttggggcatttgtccgccgagtcgtagaggcagtaggagctctcttctttgatgttctgcgcgaaagagcacgaggtggcctgcggcgctggctggggtggttgcggcgggggcggcggctgctgctggggcggcggcggcggcccgtcaggcggctccatccggcaagaccggggcgcgtctagccacaggtctatgggcgagggcccgtagccgtgcgccccgggacctagacccccgccaccgccaccgctgcccggcgacgctgcctcattgcgcttgccgcccagcgtggggaagagcccgcagctctgcagcccgtagggcaggtcggcggcgggcggcaggtagaccccgccgtgggcgtagtaaccgccaccgccgccgccccccgcgccaccaccaccgccgcctgcctcgcctctgcccgagctgatgagcgagtcgaccaaaaaagagttcgcggcggggctctccgagcatgacattgttgtgggataatttggcgaagggagcagatagccctttctggctgacatttcttgtgcaaaacatgctgaatacgattagcaatccccccgcaccgcggcgggcgcccgcagccaatcccgagccagagtttccgcgcgaccactcccagtttggtttcgtaggcgcggggccgctctccgagggcgccctcagagcccgcgattgatataaatatgtaatctgtattgatgggccaggagacgcaccccgacaccttggcccgaaggccgggagctgtgggggctgccccaacgtggctggtggggggcctggccattgggctcgccccgcccctacccggacgtgagccccataccggggtcccttagaagggcccttgggccccgcgcagttaacaagtggggtgtttatggtgcgcgcccagtctgccttgggtgctcaccatccctgtcgcagaagctgccactagtccccggtgtactctaaccactgaagcggccgtgtcggggactcacgcgcttcccattcagctctggatctggaactggccccttgtctgaattctgcctcctcaaaagtggcgaacctggccctatggccgtcaggatcctcagagtgtcaggagcccagagtgaactagaagctgacttgcctctacttccagtatccacagatttttccccaaaatgcagtggttgttccctagcccctaacccccaacacttttctcccctagtccgttgatccagttaggatcttctcctctggtgttgtgctcacccggcttgccttctctacaactcctgtcagtggactttggtgggctggcgggactgggggtgggaagcggctgccagccttgatggaaagacggccccactcccactcccaaggccagagccagatccaagcatcccctcatcacctagggaagactctaagcccacagtcatttcggggaagtaaaatgctggccttggggtccttggctggcccaaagtgagagacttggaggggtgtgcccggtgtacacctccgctgctttatgttcctgctctcctgttagctttggcactcatatgctcctggaggctacaacaagaaccagtgtcactacactcctacctctctgtcccctcccctcttcccctccctcccataccctcagctagggcagtccttgctcctgcagtgtgtgcattttaacgaggcctcggtgaggaaatcctttccctgcaaggccgggctgggctcatggtcctgttataagagcatgtggaggtcaggccctttgctcagcaggctcaggggctctgttttagccaactggaaatggccggcctggggtgctagcccccaagtgtgagcctcatgctagtctcaggaaatgcaaccttttccggccagatccagtggagcccgggaggtcgctgccttgcccctggcccgtgggctacaggtctccaggatactctaggcctgcccgcccctccggccccagtcggagctggcattactgaacgccggcatcccaggaaatagaccgctcaggccgctgccttcagctgggaaagactcttgcatccgggtcatacgcggcactttgcctccttcctcccagtgtgaatccagcccaaggtggaagaggagcctgagaggaccctgaaagcgcagagagagctggctaggtagagctccagctctggcttctgagattcaagcagctgcggtcgctgcgggcagtggctgctccgagctccgggcccagaaggccgctccaccgctagcgcggcgctccagccacttcaacctcggcgccccacggtgacccggccgtaaggactgagcatcagggtgcggaggaggaggatggagagaaaaagagagagatagaaggagagacggacagagggagagaaaagagagagaaacaggaggggagagagaataagaaagccagttctctccagcctgacagggtcttgaagctgcagcagcggctttagagggatcaagacagggtctgtgccaagagatcattaactctccttcgctcttcgcatgctcctgcgcccaaggccaaggcaaattctctaccctctaggcccatgagacggacgaacctgagtgcagaaaagcttcagagcaccgcagccagtggccctatctttagcttcccggatctgcctggtccttaccctgctcaccagaagggtggaactggctgggactgttgcccttagcaatgccacctggaaatgccacagagctgggggctgcctaggaaggaagctttgctcttcagcactgcccatgcctctcagaaaagctgtgtcatttggcaagtgggtcccaagaccttcgaggtttcctcaaggataatgagccgtggcaggtcagtgggccaggacctgggcctagagtcatgcctctccaggctaaatgcagaaagcaacttcccaggccgacatctgggaaggtccagtatatatttgagatagtggaggctatacaaataaagtaaaagacaatgatcttaacctatctttcctaaccttttagggagtcaggacccttctggaaaatccaagtaagttttgactcattctgtgaaaaatgcatatctgtatattcccacaatttgatccatcatttcgaaggagttcacacacccctcagtcttttccttgggtcttccagagtcccccagtgtcctgggacttgggggccctgccaatttggctggcaagacaagctgggtgccctgcagcagacagctcaggtcagggccccgtagggcagccaaatgggcttctaggctggatagaatccagggacctgcacgtgccaaccaaggttacaaaagtcagtttgtatcgcatctgctacaaaaggctgccccagccgaagagtagaggagctgggaggcctgctatgggcctcgcaagccgtggcgttggcacttgggtcttcagtgacctttctgtggtgagccagatgtgtttctttagtatgactttttcccccttgtaataaaccaaacgggatgttgggcttgagctccttctggcttttaaaaagagtgtgtaagctcatgtatggcagcccctctctggcccaggactgccttccaactcccaccagggcttgctgagtgggaaacgcagcgagacactgccggtgagctggccggctgcaggcgggccggctgctgctggttcaaatgagaggatactaacgcagcagaagctcaagttaaacgcctccttggccctctcagttggtctcctagcccccagcatccctgaccgacccccaaggctcccatgctctctagactttaacactggagtgttaggtttctcaataaaatattccatttattgagcgcctcggctttcctgagattccccaccccaagagatgaagaaagcgattcagttgtagtgtgggtcggcttccaagcacttttcctccctcgtgctcatttgccttctttcttttttgccattcttcccagctactaaatttctccctctccctcagggtaactttgacctaaatcttcagtgcctgcttgcctcaaccaggccttatgcagcggttacacagtcacctccagagcccatgttttatttaggaggaaatattgcccatttctacccgggtaataacctgccagccctatggggccaaagtaaacaccaggcccatggattaaggccttcggcaaggattaggctgcagttcactaggtactccttctgagtaggcccttgtaagcagtgagaaataaactattatgaaaaacaagttcctaatgaaaagataccaggtcctgagatcgaaactgctagtaaacaatttatatctggagggcactctcaatgctttcaagactctgaattatccagcggtggagttgggctgcagtcccacagaggaaaaataaaggctgcttttacatatctggctttagcaaaaaaagaaaaaaaaatcagagcttctcatatccatgcatttatgcatagttagaaaatttttccacaagcaatgatgttcttttcccattcatctttaagaatgtcaacattttcagggatatttgatgtgtctgttttgaatctatcaggtgcaatctattactaaacaacatacttttaaagttttctaaatccaaccattaagatggcccttcccctgttagggaagtgttggggccttttcacacaccctttgaattgcaatattcttagatttgttcataataaacagcctctggccttagaactggaggcggctctggcattgtagggagggctcccgctgcagagagcagctcactgggtgggcgctcatttcttgccttgttgctttgctccgtcatagtttgggagccagccttcaacaaagactagtaactatgataggcaaaatttacgcaacaaacaggcagtgcctactttctctgggattcaccccactcaccacgcactgtatatttgggaaaagaaaaagatgtgggaaactaatggaaaaatagtagaaaaaattaaatataggagaaagagggaatttgaatcgatccttcaaaatgtaatggaattttttcatttaaaatgtgtttgatgacaaccccaatggagtgattgctccgtcaaaatttatcctcggttccagctttttaaaaaagtattagtatttaccaatacatttttgcatatttgcaaaatatcttctacaaaagatctaattttcatatgtaagaaattgctgcgaaattgcagctgggtttataacagcgtactccaagtatgcaacacagagacttgtctggcactctcaaaaatcacatgcgacttctccgaattggcctttttcggaacaaaggttttctccaagctgccgggcagacatagagatgcacctagtaggaaaccagtgacctccaggacttctgcccctgggaataagctcgccttagcggccgcagacttctaccaccccattgtttagaatggaaactttgttttcctcaacccgcgatcacctttttttttttttttgccctcccacaaccccctatcgcagcacagctggaacactttcgcctagatgcctctcatccctagcccattctattctgtgtatttctacaaaatcgaaagattcgccttgagtgaaatgctggcgcaaggagctaaaatcctcaacttttctacttaggcctccccctgctttccaaccttagggagcaatggggtgggggctccctaccgcgtcaccccacaaacccagccacgttcccgagagccctgcttagacatcggccacctccccactcccgccccaccagactgaaattgctaaacttgtggcctcttaccttgacacatttccgaaatcactgccaagggacagctggcttctccgcgcggcgacgctcgcgaggcctagcgaatgcgcgttgctttaaattaccataccaatcacttcttgagggtgagtcccctttttctgttatgaaggggagcgggacaagtgaaataatgtaccgtgctgctcttagtatcagaagcgaacaaaggccaagaatcatgctggggttcccggctccccggcggctttgacattgatcggaagtgcgccatctcgtggcggctgcgcgcctaggttgggccggagttccagccccgagccgagagacggaaaccagctccgggcagagagagaaggagagaggagaggatgtgcccagcccgctgctattgagatctcatttttacatctaagaaatcgctgcaaaaccccagccgggtttatagcggcgcattccaaatatgcaaattggccggccccggacgggtttacgaccacattgtcacagccatcggaggatgggcttttatagggctcagaaatcaaacccgcgcccgcccgccgcccgcccgcgagcagtcctcctggctagactctctctagcaacttgagagactttggttaatctttaaccatcccaaaggaagtctttccctaaacccaggcttcccagcccgccccctccctgccccccaggagggcccttgttcatgtctgcgtgtctgcctatcaacctagacattcatctctagatctgtcccactaccctttcagctcgatttccccagtcgcgccagttagacaaacacacaaacaaataaacagagtggggtctggggcctctctccaaatgcgaccctatctgctgctctggccctgcctgggtggctgaagagagggtggggtgggcaacaaagggctctgtcctttcagcccttctcctcaaggttatgggtgatgtccaattttaaggcagaagttcaaaggcagcaaacaaagaggaaatcggcatcctttttttttcccccaaagggaaaaagcagcctcagctgggagctggggagaaagcacccttagaggctcctgggagtctgctctgccttggaacccagaccaggctccctcttgttgaagcctccacgggcccccggacggtcccactgcaggcctacctgtcctgaggtgagcgagggcagcctggggtctgacctgttggccacctcaggccccaaggccctctccagggctgagatcagtctgaggggataaagtcctatattccaggccctgagataccacccaggtccccacttcccacaaggacgtagccaaccaccttggtttcctaagcctggcttctgttgtagccaattcctgactcagtcaccttctcaccccctcaggggcctgataacttgctcctcaactaggtaaggcattttttgggggggtggggggaggggggcagacatttggtagtaaaaggcgatcagggagaggaatgtcacaccaggatactcaaatttccaccgtctttattttccttgtgcccagttgcctgtataagtgctgcaacacacacggtgggtaagaaccagaattgaggacaggccaacactcccagtacaaatggagccaacagacatttcttaacacagggaggcaaaggagattcaatgggagggtgcctggctttcccagatgagatccccaggccggccaggccgactgcctctgagcatttccctaactctttccaaatgttgcaagagattaaaaagaccattctcaataccttttccaccccctccaacaccctaaaggaaatcaactaatggcaaaagaaaaaagaaaaagagaaagaaagaaaagaaaattgattatggttcctttatttacaagttttttgaacaccatccctgtatgaagcatacattcaaatattcttagcagtgagcgagtttaaccacggaacactgtaaacagatagggcctttaaatattttcatcatctcttttcccctctacattgcatcttttaaaattcgctttggttccttcagggaaatatatatatatataatataatatttatcttttaaaataattccacctcactctca

SEQ ID NO: 262 - DNA, 23830 bp, Homo sapiens
  source 1..23830: mol_type = genomic DNA
cttgctcaccaaaagccttgacagcttctagcccttaagaacacatttcagcttccagctccttccaagataaaatgtggccgagcaaagaggagagcaggaaatgcaagtaaataaggaaaactagtcttttaaaaaatatattttggcagtgaaaagggttatagggctccttttaggaagggtgctttgcgaaccctgggatggcagcttttggcatctgcttttaccagaaaatattacaggcttaagggaacgtgggcggggggtgcagagagggagcagcgctgcccccatatctctgaggctttgtcaggggctgcgtgggtgagagctttctgctgcctcagccgccttaattcaaataccatctggaagaaaacccttttctttgaccactcaacactgaaatcttccccaaatctattactttaacttatgagatattttaataaggatttctttttaatatctaggaaactggggggtgaagtcaatacttttttctttgaaagccaaaatgaatgtcttgactggtaagatgcgggaaatcacattagaatctcattttaaaatcttagccctgggggaaggaggaagcctccaaaccacccctccctcagctaaagagtagatttcagaaacgtgttcaaatagtgatatccctgaaggatcttcatccttaggtgaatctctcccctagctgttccttatttttccaggtaattttacacgtgtctctaagctgattacttaaaagaagactcctgtatctgcttagcgtgacgaagaggtggaagctctagtcttcacaaagcctggttttgcagcctctgcatttctgaggtgcgccatattttggcgcagaggttgaggtgcggagaggaaatctatttctcccatagcccaaaccctttaaaaaggatatatatatcagcagccttaggacagatatggggaaagcacctctgggtgtgagagaaacactgagctctccacagcagcctggcttggcatcctccgagccttttccttaaaccatgaggagtttctctaaaagcagctcgttgggacccagcaggtacccagaaatggctccagtgcctgcttctaaggataatctgagggagcttcacagggggaagataaaggccatgatgatggatattttggattgcaaacaaaatggcgacattttccacttctgtctctgaaagatacaatccagggagaatagggatttatttctcacatccgatgctcctgatccccagacgaaagcagttcctcgcttctagctctgaagggggtgatgatggggatgcaggtctgaggtctgcattttctgaatttgattcctttctcgaggaatccttaaatctgaagatgaaaatatttccctttactgtgccttcttttgcctcttctagccagtcagtaagcagccctatcttaaatccaggagtggaaatgtaatatttagctcctacaacatcaaatgaaaaatttataaaattgcagttttattacaaagataccgatctccttgctctctccccctccccctggggccataaaaagaaagctgggtgggggaaggagaggaaataaattcagagaatgccaaatactacattcagcaggaagctaatgctgggattccggcagtccagggaagggctggctcagggtgactctccccagttcagtcctccgtttgctggagacctgggtgagcctcagtccctttcaaactgtttcgctccgcgtgcagatttttggagcaattctttcctcctgacgcgataacagaccgcgaagcatccccggaggagaccaggagtccgattgctcccggaaagtgctcggcatcctctgcgcggctggctaataccgaggtttaggcgttagttggtccgctttgacccgaggaagagcatggagcagaagaccgccctgcgttatcccccggctgggccgcggggcacctgtgcgctcccgctgcgccttgggccgggatgtctttgtttcttccgtgcacagcactcggcagcccctgcgccctcagcctgcctccgcagcagctgggaaccgggcagcccagctggcccgccgcacggcgttaccagagctgccgcagccgcctggagccccagccgccatcctgagaattcgccgagcttccaggcgaatagcctggccaggccccatgctggagccagagggctgctgcgtccggcctgctctgccggctcgcctcggcctgaattccacgcagacccacgtcttcggccaaagaaccccttcttaacacggatattattcagaataaaaactttatttctttttgtttctcagaatgtgagcagcaaggaatgaagaactctcaaaacaaatctagtatttttcgcgtttacagattttttttttcagttttgccggatgttacaaacctaaatcactgttttcaaaagctggatcttctctggttttattgtatcgttaccgtttaaaggaattatatttctctttcaaataaaaaaaattctaagtacgccaatacacaattgaacaaaaggcccaagaacccttctgaaccatcagggtacagaattctttaatataaatacgaacggatggggataaataatatttaaaacttagattattcaatgcttgcaaaaaaatataaataaatctgactgttcaccagcatacacacacggaaagacgtacacttagtcatccttgcacagagagcccctgtttcaaagcgcctttgattttttttctcactctttacaagaagtgcaattaaaaaaaaaatttaaaattaaaaaaagtaatcgcttcccctcgggagccataatgtaagaacaaattcacattgaaaactcgactagaaaatttgttcatataccctgtttctgatcaaagagtggagaaggtaaagggtgcagggccagtggcctatcgaggagcaggaagagataaatatcgctatgatacagccattccagcaaccaagattgctacgtcacataaactataaaaacgccttaccaacgaggggggaaaccgggaaacggagtgcggggcggagaagagagaaaaggaaggaaggaaagggcaggaagaacctaaaaaaaaaaaaaaaaaaaagcaaccaaagaaaaaaggtgggtggggggagactctcctggcgcgtagccccaagcccactatcacaggtgggtgagcttgggtgcttcctgaattcttccctgagaaggatggtggccggtaaggtccgtgtaggtggggtgcggctccccaggccccggcccgtggtggtggccgctgcccagcggcccggcacccccatagtccatggcgcccgaggcagcgtgggggaggtgagttagaccaaagagggctggcccggagttgctcatgggctccacatagctgccccccacgaagacggggcttccctgtatgtgtggggtcccatagctgccgttgccctgcaggccatgagcgtgcgggtcatagtcgggggtgccccctgcgcccgcccctgccgccgtgtagcgcttctgtgggggtggcgggggtgcgcagctgggcagggacgcagggtaggaggcggggggcagcccgtaggtaccctgggggggcttggagaagggcgggggcgactggggctcatacgggacgctgttgaccagcgaatgcatagagttcagatagccaccggctccggggggcacggggctgcgacttggagactggccccccgatgacgttagcatgcccttgcccttctgatcctttttgtacttcatgcggcgattctggaaccagatcttgatctggcgctcagtgaggttcagcagattggccatctccacccggcgcggccggcacaggtagcggttgaagtggaactctttctccagctccaccagctgcgcgctcgtgtaggccgtgcgcgcgcgcttggacgaagcctgccccggcgggctcttgtcgccagcgcagctttcgcctgcgaggacagagagaggaagagcggcgtcaggggctgccgcggccccgcccagcccctgacccagcccggcccctccttccaccaggccccaaaggttcctgcatccgtcaggtcccagagagaagtaggaactaggtgctatcctctctcctggtgggtaaaacagtgatactccctcatttagccaaggagcaaatcacagccttctcgggggaaaggacagagaagtagaacccccggtttgccttcctggtctggattttctgtttagagctattaactttctgactcatttactggtccctttggcctatcggacaacagcctccctgtgggccggtctcagcatctccattctcttcacagtaactgaaatgtgggaaacctaatgtacacactcatttccctcccacactgtctgacaataattaggcagtagcttcaactggccacttttttctctctacccagaggagatgggcagactggaaacctcaaactggaaggccttctctgcccaaagaagagatcccattgaaggtatttctggtggggaggcctaggcccttcatgctaggtcctattctttagggttccctatgtcatcaagcagccagccccagcttttgtccactaatcttgtacccttctgtcttccctggccccccagatcctagctctggaagtcccagatgctcaggctcagagcagggcactggcaactggagaaggcaggggcaaaggtaaccaaaatgctaggaagcctaaagcctggggcctttcctctactggagcccgctttcaggaggcccatgtggttcccattaggatgataagtctgcatccccctcccccaggagatctttggctgctttcattgtactaagtctgagtagggtcttcccagaggtaaggcagccactccatctgctggagcaaaaattggctctgattataggcaaagcattgattctgtcttggagggtgattaggcctgtttttattctgccacatttcagtaaggggaggatgtcactgtttcattagaagagctgtgctaaaaagatagacagtggagctcaggttgtttctgcacagaggtcctaactccaagagtggagcaagaagagattccaactgcactagaccctacttgcccttggagaagtccagagggactcccagcaggtctctggtgttttccagcctacagaggcctatcacctccctaagttgcaaagactatgaaaacctttttggtgggcagtggtgtgggagcagtgaattccagacatgctccatcgctcctaggctgtgctggatgtcgtgggcagtagcttggggaccaggagccaggccagaggaccctcttccagaaggcactcctttacctgagctggagctgctggttttctgctttgtgttttgtcgagactctttcatccaggggaagatttgtttggccactgtgggtgagttgagcagggggctcttggccgcgttggcaggggtagggttgttgctggcattctgaggaggggaggcagaagagggaggcgggggcgcggcaggggtaggtgcagggggctgaggtgcgggctgaggcggctgtggggcagggggcgcggcctggggcggcggcgggtgcaggggcggctctcccaggcttggaggctggctaggtggggcgctcagggtgcgcaggcacgcctcactcagttcgtgtgccttggggtggcccccggcgctggagggagactggagggagcaggcgggtcggtggtactcgccgtcggcgcccaaagcggcggacgccgggtacggctgctgattggcattataagcgaacccgttggctgcctggtaggggtagccaccgtagatcgccgagctgtcgtagtaggtcgctttttgcatcgcgttgtttcacgatcttgatcgcacactctgacaggggtttgacacccgtgagggcgcacattggcacgcccccgcggtcacgtgacactccgccgccaatggccgccccgcgcagacctggtggggcgagaagcgcagcgcggtgagggctccgcgcaaatccatcttactctcaatagctaagtgacatgaaagccataaaagaaaaagtggtcagcaatatttagcagcacgacttggccccgggcgcagggagccgtgctataaaaaaccgctggaatttactggcagctacaaatatttgcttaacttgcgtctggagttgggggattttccggggagaaggagaatgagtgagggctgcaagctgattctcaggagccgggatccaaaaggagaaaggcttgataggctagaaaggaaaaaggctgggatctttcttttccagggaagaagaaacttggggtgtcgcttagtttctgctccttggcctcctccagagggcccaagactcctccactctgggaatgttgggaagggaacgaggaggcaaaggggagcttgggtcgccaatgttttctccgctttaggactgatgtttgccaaaagagccctgagatggggtaacttcccacccagctccttcttggaccttcctgctcccaagagaggtttgcacaaaaaatttcaggcaatttgccccatccaaccatgctggatttcagaagctgagcttgttaggaagttaatccaccttgttggggatatgactcacctcctccaaatgaaccccttgtggccaagccaaggggggagggaaaactttgtgtggaacacattgcgtgtgtgtgtgtgtgtgtgtgtgtgtgtttagggtgagggaccaacagtaacaccccacccagcaagtcacaactaaaatcctggagagttctttactcctttcctctccctgtttctcaggcacttcccagcaagccacccccacttctttacttctttcccccagttacagaaggttcccagaacctcctgtcttggactttctaaggtgctgttattcggggcaactatcaaattctacctgttaaaacatgatggattagagggggaaaaaaaacccctccaggaacctgaaaaaccagcgttcatctccatgaccacagtttgaactctccttccaacttaacgataataggttctgtcttagaaactgctatgtaatttgatgtatgggggtcatttggctcccgacgagggatggaagcacaagccataaaatcctgccagagtttcctgatctttgtgtgctgttgttgttgttgatattttgttacttggcctatttacctgcttcagaaataccaagtaaaggataaccctgaaaatctaaaaagcagttgaaaacctcctcaaccctctttcatttagaaagcagtttgcaaaagttaaatctgttttctttttgttttcaaccactgcatggtcaacctctagttctcagcacagaaaagttccatgtgagtttcaaatattcacccacacacacactcagaatcttagtccctctgaccactcaagaaaattataacaaattcaaaagaaaatggttaacatgcaatccaactatgtatattgagtcccagagttattcaagttttccaggaatattagatgctttgttaactagaaaaaaaaagataatgtattgcatctaccagtagatgattataattccattgttgataatggactcctttagatttcattattaagccaacaatcttaccaacatctgcaaaacaggcacaattaattttccagaacctcgattaaaaattacagcatcgcttatccagagttattgtcagtgatcatgagccctggagcattgtttctcttttggaaataggaagctacacataccatggttgaaagtaaataaaggataaagtaaaacttaaaactgaatagcaatttagtgtatccgtttccttttcttttactgaaaacagttcctattacatttggcagtgtcaatgtctgccattacaaattttttagataccaggcttgtgtaaaataaaatgtcaggttaagaaaattagacactcgaacagcaagatattagataaaacaaaattaagctgattttgcacatgcaatatttctagtgacttgctaatccattatcacgttataccagcctgctacttagttaagcctttttatcaagttgtgcattgtcttacaaaataacaaaaatatctttgaaaatcaaagagcatacaacagccctcgtaaacttaaaatataaattcgattctgggatcccaccaaaatccttcctattgttcgaggtcagcagaccaccaccttggagctcatacatccccccaccccaacccagcccccaaagtttgcaacctagtaaagaagttggagatttgccagccaggaaactttgctctgtaccgccaagcaagggctggggatgaggggagattcctccacaaagatctgtttctggacaataatccccaggtgcaagagccgaaagagagttgaagaggctaaattgagtgcaagaagcaagccctattgtctctctggaagatgtgcccaaattcaacctccgtccttcagacatcgctccctcttcccattccctcctctttcttagccttccctcaccccaaatctgagcgggttcgtcggataggagccccgagtcccctgcccacctctccttccctctgcaacccagaaaagttaaggctgggctaggggagaggcaagaggtgggggcggggatgggaaagcggcctgaactcgaagtgtaagggtatcagtcactgccgggaaggaagctccggcttgtgaactcttcttgaaccgagatttaagtctgcagccataaatcaccgagacgtaaactccgccattcagcgccgggagcggccggttgcggccctgcttaccttaacttctgacgagcgcaggctcgggctcaggctccgacacgggctctggcccccggcctggcttggcggcccggccgggtcccctcggcgcgggatgggcacggaccctcagcatcagccgagatggcaggcgggctggagaccccgaggcccggtcaccgccgcgcagagcgtggccgcctcgctgctccagcacggctcgcccagggccgactggggcggcttggacccccctcccacccaccccacccacccacccctcccccacacccccgccccctgcccttcccgagggcagcagccgcggcccggagataagcgctagtgcggcgccgggctctgcctgggctagtggcaccgacttgggtatgtttcttatgaatattacacgcggagcagcgtctggtccgggggtgcggtggggggtgttggggcgggcgggaggggagaccaaggcggctggggaagcgcgggctggtgtgggggatggggctgaggcgaggggagggaccggagggagaaggggagctcggcggtggcgggaggagggcagcctccccccaccccccaacgccctccctctcctgctcccaggcgtcacgaaagtccaggaaaattatgctaatgaggacaaacggctctcacaaaggggctctcttgctgggctctatttcttaggaattcgtttgagaaacttcgtattcctctgccctggacacttccaattgtggggtgaggggaaagagaaccaagaaaagtgagtttcccagactttgcccagtttacttcacctgcaactcccaaacagatctttgggtgggggtgtggggagctgggataaggcttttctctagagaccctcaagagccaactgggctctctttggttaaattttcaggcagaaactgctgacatcctagcagccaggagaaaaatgtcctgggagagacaggtacttgttccagcagtgaaatgggatgctctgggctcaggtacaaacaagggtgtttagaaacgcggatctccagggctcatgtgcccatttcagagtgcagacacgcagctcacccacagggaagacagagaaagctctgaccccaagagaaaccgacatcatacacacacacacacacacacacacgcagggcagaggaatatgtggtttctcaaacggattcctaaaacatacatatatatataatatatattatatatataatatatattatatatataatatatattatatatatgtatatacatattttcctcattagtgggatggagtaacgctgagctgggcaaaagaaaggtccgaatttgcctggtaatattgccacaacttgaaagtggatgattttcctcctaaagcctcctttgctcccagcttcagaagcaaactctgcaagggtacgagtgtggcaaaaagagaaatggagatttctctcttttgctgcaatcccaaggcgtcaacggcgggtccttctcaaaggaaggtgttaaaaatataagtagtatgtttaaactgtcaaggagccaaagtgtcaccttagagcaaaaacaaagccaggggaaaagggagaaatcaaaaagcactccgggccagggtggcctcatgcataccaatggtttttgtcatttatggctgggcaagatttatgactcggcgccccaaagctgtaaacagagcacaaaacagcaaacacttgctccttatggcatattgcagagcaacttgaaagggggagctggccgcgtaggaggtgagagccagccgcaaaaatccgttcggcggcattttctcttcaaacccgcccggtcggatgtggcatttgaagaaagaaggcgtgggtcaataatcaacccgcactttctcctccaaactgctgacgcgactctcaccgccttctcagctaagccagctgccgggaaggccagctctccgtaagaacctgccaggggaagggattctctgggccaaggggaccgagggctcccgagcaagggctggggcgccctgaaagcatacctttccactggcgccaagaccctgccgggcaaaacgcggggaccagacctgaggagccgtgggagcccagggagatctggggcgggagcttcgttccggccagggcctctatccgccccgatacgtggctcctgggccgcgggcctcagcgggcagaagtggggctccgacctcaagatgaaggtccagcgtcctggcatgcagatggtcggtgccccagcctcaagccgctctgcttaaatccaaaggactggctttggagcaagcgtaggcgagattattttaaaataataatttatgctggcggaaggtttttatttgttggtttgctattggtgttttgttttttaagcgaaaatgccgattgttgatttccacctccagaaattaccagccgccgccgctgcgccctttctagacaaatcccacagcagttcacccggctcccccaaaaccgcagagcttttctttactgagaggaccccttggttccaccaattcccccaaatccccgtggctcccgatctctcatccagggggactagaagaaaagattttctcagcactagaagaatacttggagcagcaaaggtgcccgtggtgtctttctaccattcaaggggtgtcctcctgaaggcgtctgagagggcctctggcggttccaaggctgtgcagccggggaggaaggtgaggaatatcgtgggtaagaagaggcaccaaaatcacagaatagagaggaaaattattgaggaaatgtacttgcctgtgagggtgaagctggcatttcgaggtagaaggggactagccttttttgatatctaatagtttagcattatacgtaatggactcactttagcactttcatgggaggaaaaaccaatctgagctctataaatgtggctcttggcttctcactgtgcatgcttttatgtagaaccagagtccatccttagatatttattcagcttgctggcactgaagcaacaataaaaagatgcctctaacaaacctctattccctctctcattctttctagcaaaactatattatttatgagtctttaactgggtcaaaaatgcgccagaactaggtcataaatcatatgaaatgctgacaagtaattgaacagcaattaaagcttacattttatttccaaggggtgttttagagcacttgaaagggcctcagttaaacacttggttactgccgaggccggcactggggagggcagaagggccctttcgttctggggtagtaaatcccactcaagtaggggatgcctgatttgatttttttttcacgtacagaaagaaataatctatattttaagaagtgaaaggggcacatccgacctctgactccttataagcatccctttccctactgcaaggagcataatagagtttcctgcacctttccagggagttcccacccttcccaggagtgtggggtccccaaagcccaattagctggggctttcccaataatctggaaacatgcagtttaactttcatctgcctccaccctggctacagctctgttttggaggctctgaagctggagagatgtctgcctctgcttcctgaggactcttgtctctggacttccctccaacccagggcccactggccagttctggaactctccaagccagctgggggtacacaaggaatgcccagaccaggcgcactgatgaagtccaaacctaatcctggctccctccttcctctgtctcccgaatgttagaataaggagcccctgggcatccagcatgctcaccccaccccaaggctctcctaggtctgagctgtctttcttcaaccctctggggcagagggtgctcagggaaacaatggcgggccctccggttcagatccttgggtctggcttcttgggtccggcttgtggggaagcatgctctgcaatctggcactaaacaaagtgcctggaagcatcatcaataaaatggcagcgcatctgcacatttccctcatcgatttccctcttccagctgctccggctgctcaggtcagcccctaatcctccatcccctgcctgaaaacaccgccatcctgggagagattccccttctcacccacccatcccccacccctcccaggcaatctagccctgcaagccggtccacctctgcctgcacctggcttctggaccctctttccgcctggggatcagctcctgagactccagccctgccctgctgcagtggacaaagccacccttgcactgggggccactgggcccacctaggagcccccctagtgccccctcctttacacccccaacactttccagggaattaaattcagagtctgaggcgctactgggaatctttcaaatggtttcggttctaaaagagaaacaaaggaagagagaggctgagggtcctgtccatgagccagggtctcctcgcctgacctttgtctctcacagccataactcactctagatatgaacaatcggcggaaataccttaaaataaattccatcctcctggtatagcctcgacttccatcggctagctcgcccagaaccgctccatgagtgctgaaaactgcaatcggctcagagagcgctctccggagaaggggaaggagaaggaggaggtgggtgcgtgggggttgggggaaagctctggctctgtagagaatctagaaaacgtaatcacaggcgaagcctgtctgggtctccgctccaaatgccacaataatgcgctgtattatgtgctcacgtggtcatacgtcaacttaaatccttttatttgaaatagggaaccactgaaggaactaggtttccaaacagaatatttagctttgggggagggtaggtggggaaccttgaccagcagttttgagtttaagagttctgtctaagcaataggatgcttggagccatcctcccatgaatgccatataagacatacaagcttatctccacttatatttctttacacaccctccaaacacaagggttacagcaatgctattcacatttttagaatccatttaactttccttacagcctcccacccacggacaagctggatcctgcacacccatgcaccccagtctcctctggcccacaggccagtatatcaaaaggcaaggggcaggcccagaaataactggcctggacagcggacttcctcacagcctgccattgtatggagtttgctaacacccacaccatacactacagacgcaagaaacaccaaaaaggcacataattacctgacaaaaggttaaagcatctcctccaagtccagttggttttgttcagtgggagcccactaggaaagatgtgcttggctatagagtggtgggtccgggttttgcaaaatctagagaaacctagtgccctgactaaacttgcacttaagcatttcctcagtgcacaactgagtgatacatggaattataagtttctaaacataaaaaatatcagaggaaatgatctaattgctctgcaagagacccccccccccaaaaaaaataagaaaaaaaagaaaaagaatcaaccttcactggagtgccttaagttaacaaggcaatctgggaccctctccacaggcaggtctgtccacccacttttccaagacaattctgtgtccaccagcaaattctctccccacccccacacaagttcctatagagatatcaactcaaagatgagaaagagcccccttcagaactctcaaaataatcttgagcagaaaaccagtagagaaccaactgtgctcaggaagaacctaactgaaacaaataagctgctcccacccttggttccacccctactcctgccttctgcctgatgacattgcccactaatttcaacattgtaccgtttcatgagctgtctaaaaatcttctcttttctggtcttagtttctgaacttctgagagtgctctgaggctagtgagatcctcaggccatattctttttttcctggagaatgggtcttcagctggctatgcctgagtgtgaggactcacttatagcagctgcaggaggctgtgcatgattcctccccttcactcctcccctgcagaggaacagaaggggtctgatgaaaatgtaaggcctttcataagagaacttgttcatgggttgtccaaatcagaaaggcaataaaagaagagacctaatcccctggaagcaagtcctggcctaagctggtgacaatatttcagtaaggttcaatctgtggtgtagctggaagagaacctccatgtgaacttttccagctcctatctaagttacaagctggaaagtaagaactccaagtgaaaacctgcctctctcaggtttgggggatagaggacaggagtagaagctggtttccaaaaagcgttctcctgacccccaagaactcactcctctcattcttactgctgcctgcctcatacccctcaccaatcattcacactgagctctccagataccctagaaagggacctggaggtattgctggcaaattcctccctacccccaagtttctgaagaggcatcaactcaaagatgagaaggggcccccttcaaagctcttggaacagtcgagcaaatgaaaactcttaaagccataaattgtccgggtgcggtggctcatgcctgtaatcccagcactttgggaggccgaggtgggtggatcatgaggtcagcagttcgagaccagcctgaacaacatggtgcaaccccgtctgtactaaaaatacaaaaattagccaggcatggtggtgcatgcctgtaatcccagctagtcgggaggctgaggtgggaaaatcacttgaaaccagaaggcagaggttgcagtgagctgagatcgtaccactgcactccagcctgggacagagcgcgactctgtcaaaaaaaaaaaaaaaaaaaagccataaatcaatgaaataagtcattggtactgcttcagagaaatgccttaacgccagcaaagctcagaggcatctcagctccagcctggggcctccaaacggctgctaacatccagttaatgctccaactgctgtttaacaattaacattaatgacttggggtgggatgggtgatttggtgggatgagaagggaaaaatctgaaaagtcaaaagacatttaacttttgaggttaaaaaacagcttctctatgagagatcttggcctgggcagcctatctggggaaccagcagctgacagtcctcctttgccactctgcaatccagtttcctggagcaaagctacgggccttttaaaaacccagctgccagtccctcttcactcacttcaccggcctccaacttggcctgcgctgggactgatactgtggtcctggtcaccagagccaaaatagggggaaagctggcttggaaaaagcaggcaaccaagggtacacaccgttagccaatatttgcaaggctgttggcagattagatatatctgtactcaaacactgcaatctgatttctctgtcaaaagtacacttaacatttttgtcccattacttaaatctagtggattttctactcagcatcaggtaaggctctcttagcccactgtgtgcgtgtgtgtgtgtgtgtgtgtgtgtgtgtgtgtgtgtgtgtgtatgatagattcttatttaacatgagatatttcctgtgggtgcaagtgcagtagagaaatgggccaagttctctggacacgtgtggatgtgtatattgtgttatacacaaggccccaaattcctgcaactatttatacatgcaattgttctgttgtttgctgagatggaaatcatatacacagagttacaaattcctgaaatgttccatctatatttgatataaacagacatacagtagctgagaaagtaacacagcttgactattgctctgtttaccttctattggaaaaaataattgtatccagaacaccatatcagccttatagcacgactgaatatcatgttgcaattaattaacaacctgatatctatttgggagcaaatttaagggaagactggaggcctaggaaatagaatacaaaatctcaaaactttttaaaaagaagtaattcctgaaagaacaaagcaaactcattccttcataccatgcttctgaaagctattccagcagcccctcccccaaacaggcatgtaatttatggatcttttacaaggtaataaaccacagtaattacctccctgcatcccaaactaagaggacaaattaagtcagaacttgaaaataatttaaaagagttttcccttgtttcaaataggaaaaggaaacgccaagacatagaaaaccacgcttttcccgtaggaagaaccgatgatgagccctgatgaaagaaggaagaagacccgctgtctgcgaaggcctaaaggttagaaatacagcaatttttctcatgccgaaggaaaggcaaaatggtctaagaaactgcaagagtgtgatacaagttttcctcaacagcgagctgggactggcgacaatttcttaactcacagcctccgcagtcgccttagtcgacaaagagagcagcccacgcagcggccgccgcgcccgtgcccgtggcctttacttgcttttgccctgaagttcagtgtagtggtttgtttggggcttgcaggaagaaacaaacacactccctctgactctccacaacccatctttgccttctgcaaccgcttctcctgcccatcgctggttttggggtaggctctttgtctgcctgaggccccgcactcgcagggcaagaagcttaaaggaatccaactccaaactcctccgaagttaaatattgaccagaacctctttcaacaggccgcggttgccaggaaccgtggagggccaactcctcccaaccgccctggtgcaaagtcccacgcggcgaagagttttggagcagcgcttacctagaaagatgtttaaattctgaaccaggaattgtctccaactccaggcgctcagggaatcgccttttccggtgtccaggcgctctgcagacaaataaacagcagaaggtgaatggcggctgcgagggaagggagttggaggccgggagtgggaagcgaggctcatgcgggcgccaaggtggccctgggggtgacgcgaacatcagggagtcaccagggcactcgtccgtgtggcgcactcattgctcgaaatgttccagtctacaaatggtccgaagatggtgatttatttttgtaaaataaatacatactccatctccacacccatactttctcctttttctttcttttttttggcgggggagtggggaaggaaaggacatgaagcaaacagaggaagctgagaaggtggaagtggctttgctggtggtgtgggctgctttcagagagctctctcctcaggcaccacaacttggagaatgtgaatgcttgctttattttcctttcctaacaaaaggaagccttgtctgggagcattcaatcacggactctcctgaaacctcactaatatgtgttcatttctgtaggcgcgaaatcagacccgggttcattccactggccagaggcagtcttgggaggatttgtgttctggtttattcaactctgggtgcgttccttttaggtcctagtgggctggcggggctaccgcagcacctagtccctcagagcaggccagctaaggctgctggaaactgagagggacgccggctggtacaatacctgctcaggggccctgctcctgcctggccttgcgcaacggccacaagccgatctgatgccttgattctgctcaaatctcgtccctcacagtatttgcaaccctctcttgccctctaaccagcaaatggtcaccgagccggcagtcagctttctgggagtgggagatgatggggaaagaggaaagaatcgtccgctcgccggaccctggcttggagaagttctgcgctccgctgggactctgcgggccctttgcgtctacagacctatccctgccccgactaccccttcactcagacccaggtaacctcttaccccagcctgccccaaaccagccctccgctgtctgtctgccttcacgcaattctgtagatagcgctaagaggggatatcaaatagctgaggagtcccctgacccctggcttcggagccccctagcacgtggaacaagtggccgcacaccggtagctgcgctctgccacagttcgacccgtagcccccacaaaccaaaggaaaaggacccaggatccacgctgcgcgctgcgccccctttctcttgttcaaacttgctttctgtgtccccaaagggagtgccccctggtcttggggctcctggcatgaccatgagcaaggtggactcagccatcctgcactttgcctctcaatttcattccagaaagatccgctatgccgccacccaccactcccctgcgtgacacttaggagtatgtaattattatggttattatttttgctgtttccttatctccaagtctaatattcatggctgctgtaccccataaatcgttcagactaatgagtcacagagagatgctgcccaggtctctcactttacaatggctgccgccgccgccgtggcctctctctccgcgtttttggcgctcgcttgctccctcgctcgcccggcgcgggtgatttatgaacgccgggaaaattgaacaaagccgcgcgcccgtcctgtggtatctctgcagccttccccagcgtgaatcagaacattaccaactgtctgcgcatccgtcccacttcatcaccaaagccaggatgtgaccgcagaaaacccaagcccgaactcacgtttccccggacgcggcgcgctccctggactcgcagaaaccctgcggaaaaggccccaagatctggtgagggcctgccagctccgtcctccctgccgagggctctctcctgccttcctgaaggagttaaaagcctttggagataaatctgagggtgtgtgtttttaaaaatcaaatggtaagttggaatctcacttctgagagattcattcctagtgaggccctgacgactccgatccattcctgacgatctgcattaattatttaatgagtcacgtgacctcaaagattacaatttcaatatctcccttgcacaggcgctacacctttatcagctgcaaccagggtcctttttttggctctgccggcctccggggcacattcatccttgccctggtctgaggcaagccaccaccatggaaatagcagggcaagcatgacagaattagtcatcctgggattatgaccgttgtggatagtggggagtccactgctctccgagatgccctgacatctgtcccctcctgagcccagtggccagtccacctgtctgagctctatgactagggtggcttggttacaaaatctccccaagcagctttgatggcccatgaggcaagaacccatccttcttctctggctgtacacacctgtgaccgtccaggtcaagtgtaagcttagatgcatacctccattcctggcagaatatcttcctaagaggaaagatgtctgtgctcttattgctctctagagtgagactaaaggttgcattccaccctcgtactcattaacttaaggaacggtggagggaggatcattcggctgcctcagttttctcatctgtaaattaagaagattgaaccaaaatggcctccaggtctccttcactttggacagtctttcaatctgggaatctctttcagccccaggaaacaatcccagagaaagtagggctggcttgaaagggaaggggttgccccgtgattttggagtcttcagaagaggtgccagagttctgtaagttgcagcctagagggtttcaagacagccacagcagcctccctcataccatcaagggaacagaacacacgtctcttcctcctattgtttccagcccatgtgtttctttggaacacgaagcagaattattcttgggacagtgtataatatagggaaggggcaacacagcagcagttgagaaaggtgagcctgtgttctgctatacaagactgtgtttagggatgcagagaccaggggagtgccaagggcagcctactgcctgcacagaacccactcattcagaggggaagccccaggcttttttgctacattgattctttgggtttttcttctctttcattctaaagagtcattgatctgtttctatgtgggaactgctagagggaaggcaacagtgaggagagcagagtttggaagcttaggggaacagggggacagaggaaagatggtgatatccaccccaccccaccccatagggaggaggctgagatataggggaatggggcccgctgggacaactgggtatgaagtcagagatgctatgcgaagggacttccctcctcccccatctatctaggtaatcttcccatggctccatcctgggtattaagtactctactatgcctgtcacagttgaattcctgctgtaataaaacaccgggtatatcatagatttcagcaaaactagggaaggaagcctgcaaagtgccatttttcttcaagggggagagtgttaagtacttaattcaaactgtgaccattaaagtgtctcctatccgatttaggtcgatttcagatgttgacaaaacttttgtctccggagtcatgcacaacttggctctgtgactaaagcagatgagtgtgtattggagggagggagaaagagagaaaaggagagtatgtgtaaggctcattttggtaaaattatagagcttacacaaaatactgtctttaaaggtcaaggatttgaggggccagtagggtttgcttaaaaaaaaaaaacaattaatgagatagaaaatttgtcctctcggtgaactcttatggttgccctagcaaagggcagacaatgcatgattttgaagcacaaagtgggattttctaatctcttataacaagctcccttaaaggccaatttgaagcaggcaaaacaacacttaagaaatggcaatcatttggatcattttctataatctgggttttgtaaaactcaccaataccttaataatcaatacagttgggacaaaaatgccatcttgtcctggaatatcagaaaaatgatctcaatcctctctcttccctttctggatggacttataagtgcaagtgaaagaaagtcacccctttcatcctcatacaactgcctgcagcatgaagctaatgaatattcccatacccctcttttcccacaaaggagaaatataagaatttaccttaaatgatgatagtctgccatttgagattttgcagcttgacactcaatttccactgagagtctaggcattttttttttttagcagacagccaagatgctgtgtccttgcctgagaccacattatttgcaagaagatccctctctcctccacagacttttcccagagaatgcctttcagaattgctgttgaattacaaagaagtatttattgtttgaggtgattaatgattcctgggaaaattgctattttcagcgtgatttaattttgttttacaagtgtgtgtagtagggggagggttaataagtttcagcagcagttgcattgcctccagaaatccctggcacccgttcacaccttataaaatgcactttatgccaggtttatcctgatttgggaaggtaagtgtgtatttgattgctcccgaattttcttggctcttcagagactggtatctatcactttcctctcaaatctgatttgtaggtatagaacggatcacccttgtttgtatcacacacagggcagcaggggtgaaaggggtaccagctctgacactggctaaagggttttgccactaatgagagaaatgtgtttaaaaattctctgatattgcagaggcaggtgagcacttactcccatctatgctaaaattactacattacttaaaagttgcactttttcaaggccaggtgacagttctaatattctggggctagtgtgcacaggtttttgtggtcttattgtagggaactccctgcagtaagcatcaaatctaaatcagtaaacaaatactagggttatagagatcgagaagtgggttttgattttcagccttttggatctagatctctggaatcgagcagaaaattcacaaagcatttgaggaaagtgacccagtttggctattttccagcagtaaactctcccaggtctactttgcatggggtgaactttaggggtatattatgctttttcctcagaagagacattggagagtgtacttgtaaaattcagtttatttgaaagctctttcttcaaaaaagagaaacaaacaagcaaacaaacaaaaattcccagtctgtagttagtgaagaggaccttaagaacagccaggaaacaaaaactaatctcaaccctttgcacaaactattttttatctcctgggaaacaggcagattaagtgtgaaggtgcaacaaataccaaataccaaagagaccacttctttccaagtgtgctcagagttcagtgtgtagaacagctgcagaaactcctgggcccacagcactgcatggtttcaactttcattgcagggaaggacacgtttctatgccttacagagacttgaagcctgaaagcctggccaagtttgggaagaagaggagccctctcagagctcaagagccttcctactctttggaacttttccacagtaggccaagcttgacaagagttcagctcaagttgaacatacatacacacactctcacacacaaattatgtgagccgtcagaatccaagtgaatccagctcaagctatctacaaggtttttacatgcaaggtcaagtatctcaatccagaggacttttgttttcttaatgaaaagcttagaaaacacatgaatcttagattt

SEQ ID NO: 263 - DNA, 9890 bp, Homo sapiens
  source 1..9890: mol_type = genomic DNA
ctaccaaacggaatttttctgtgtgaattttaaaagataaccgagtgcccaatattttagaagaagaagaaagggagtggattaaacgctaattcagtaatacctgaattttagcaaaacacataagtctatgcgactgagggtgggagaggctcgatttttccagtagacggccaaggagcgcgggggtcgaaaggaccgggaggaggaaacaggttagggaaactgcaggtcgatggcacagagcgtactggtgaaaaaatccagctcttcctcggaaaaagggaccgggctgtcgagagaaccctgtaggctaggggagaggcctccggatagctggagacaggagtcggccgcgaagaagttgaggtcgggaaggaaaggtgaatcctggcgccccgagaagacgtcttctggcaatggcccgggctccagcccgccggccccgcgcagcgcgcagccgggactcgacgcgcctgcgccctctaagcgaacggctaaaggccgggggtccgcgcttaaggcccccggcaccacctccggcgggtgacagcaggcttcccacgccgcccgcgaggcggaggggccgcccgggctggccgcgggttcctcggcagggtcgcagatgtcctccagggctcccgggcaggcaggctccccatccggcggctctcggtgctgcgtctgccgcttgtgcttcatgcgccggttctgaaaccagactttgacctgcctttcggtgaggtccagcaaggccgcgatctcgacgcggcgtggccggcacaggtacttattaaagtggaattccttctccagttccagcagctgcgtgttggtgtaagccgtgcgcagcctgcgcgccccgccgccaccagcctccggcagtcccaggccatctgcagggaaaacaggctcggcgtcatagcgggccgtgtactcagcccaacctcagttcggactaccccatcctccaaaaccagtatcacctctccccttcctcgccaccccacccccgcccccaccccaaagccgctcgctttactgcttttgggttttcttctctccctctctagtctacagccccggcccgggtcagggcaaagcattcagagccgcccacgggccacgcagggggcggagagcggctcccttcggcgccggaacctcagatccccctcccaagccctcccagtggacccctcaattcggaactttccaactcaaccggagcgagggtcagaaagattgttcttcacccctcttcctccctagctctgaattcttcctcttctcctagagttggggcagaaaggaccgaatcttttctgcttctagggtctatcccagcaacaacatactcattcccctacacagatacgggtgaaaacctcaatcaaatcattttcttctagcagaaaaaaaggcgtttccccaaccagcttccaaaatcagccatagggagagaaagagagagagagacagaaaaaaaaaaagacgctgttagcggccaggcctgaaccccagtgggatattctacttccccatcccaggaatggagggggtaaggaaccccaacaggctcgccaccattttttttaaacctccttccactgctttttctccccctcttctagctgcccctcaccccacccccaccacgcttaccgacctgcaggcgatccgaccccggaggccggaacggcggaggcggccggagaaggagacgtggcggattggctgggtttcttggcggatttcttctctttcatccaagggaactcgggggccgggggggcagcggggagtggcggcggcggtggcggcggcagagcaggcccatcttcggctcgcttttggctcctgggtctctgaagggtggaggcgccgggctggaggctggggaaggtttgctcgaaaggaggaggaggaggaattaatgtcgactccttgattgatgaagtttgaaatgtctccaagacagcggggaaggaagtcagacactcggcgagcgacggctggctgtttataaacccaatctccctctcaaattcaaaattcatggctttcaatggtgggggagggggctgctggggggggcgtcaggagggaggatcggaagggacccccctcctgcaccccccccgatttatgtaatggagcgattttgggagggggagatttcggtctctcttttttttaattttgggcctttataattgtatattgctgataaatacaagcgtatggggactctctctattaaacccaggactccagcgaaattacagggaattcgtggtcacgggaccggcctccgccaatcgctcgtctgggcctggtggaaaacagagagcattatttggtttaattgattcaaaaacaccagaggaccacgaccaggacaccatgagcccccattcctacaccagtgcctcacatgctctctccccaatgcctccgtttctccagaaaagctagaggaaccttttcctcatccccttcgaaggttagaaggtttcagaagcctggaaaagaagagactctaagggagaaaccttcctcttttccaagtattttaatagagtaaattaaggccttctttacgtggccagcagcatccccttcccttctccccttccccaggaaaagatgagtgaggatctccgcgttggaggaagagggagtcgaaagaggcttccactctttgaaaaaggtcagtattaaggtgaaaataagaaagagatttacaatcatcacaccactatccctgttaccctccaaaaacaacagttaaatcttgggaaatggacaggaactcccaggcagacacataggagtgagatggagcataaggggcatttttgggcctctggcctccatcgctgtatggtctgggttctcttctctgcccagtgtttgcagcactgcctctgccccttatgtacccctgctttcctcactttcaggcttccatgcttctctgtgacatcccccaaaaacaggcagagtctaagatgtgcatgtacccactcaagcctcaagcttgtatctgtatccatatccagggacatgaacaagaactgaggtagccattggtttaacttagagcactctcaaagttcagatcagcgttatgtgtgtgcatgagtgtggtggggagattttcccctaggacaaagagactttccctcccatttttgccattgtgctagttaaaaaagaaaaaagaaaaaaaaaaaaaaaagaatccctgacaaggaagaattccctgaagatggtaggggtggaaataatgaccactgagatgatattccatttctggctgctgggggaaaatgtttttaaaatttattttattttgaggagaccaagatagtctgaagtttagagtgttgtaatttactatggggagagggcacaagactctgagccccaagcaattggtgggaaactaggcctcaaagcagaaaatgaaaagtcgatctgggggaagatttttaaataagtgggtcagacggatggagaggagatgaggcgatcaatcttagccccctgacagctccctccgattgcatcaaagaatttggctctttgggaaagcagagcgaacagccaaaatttcacatcccttaaaaaggcctgggggtgggggtgggggtgcaaaagagaagggtgattctgggagagctgggaaacagatgggaaatggggacagagggaaagcgctaagttgggtggaaagtttgcctggagaactcccatggctttggcctcccctccccctcctctctctctgctgcccagccaggaggagaaggctggttagcagagaaatggcaactgagcccggagctggaactagaaactttctgtcagtgtaacatctgcgtgagtacttaaaaagaaggacagagaagtctgagtagaagcatgagggtgggggagaggaggatggagaaaggggagttggaggtgggggctgcagggaccgaggaggcatgctctggagggctcagaacagagagagctgctctgacctgggcaaagtggccagcgacagtagtgtgcaactaggctccaaagaaaacaatttttgccatttagaggtgtggatgggggtgggcatagaataatccaaatagtagctgtctggaagtcatgcagggaggcctgagagtgggttctccctctggccacccccttgaacacctctgaaagtttagcaacagcttctgtagctggctgaaggatccagagcttatctcaggcaactcgggcagactgtccctgcaggaaatacagctctctctaaccctcactgacagattttatggccagattagcaaacagcggaaaacttgggtgttaaaaggggcccagagaaccctccttttcagagacatccctcccccgcccccctgtcctgctgtgaatttaacagcacggatattttacccacgtctttggctgctttagctgagcgcctggaatcttccaaagagaaggatagggaacaccaagccaagttggttcttatttttcttgtttgcaattccagcttcgagccaaagctctgtttttcaaacttaagctaaattctctttcttggcctctttcctgctagataaataacaacccaacccagccccagagccaaacatggtgcttcatctagttatatcattcagaaaatgttattcaaggaagaagagagaaagagaaagaaagaaaaacccttgagcgttatttgatcccaatcaaactttgcacgctcttatgcctttaaattatagcctgacccaatgctaaattgcttgctgcttggatgagtccagttaaaatcctacttggtggtggggaagggggagggcgtagagttcaggttgcttttttattgttatttattgttgcataaagactataattactaaccttggactgccaggatgcaacataaaaatgaaaatcagccctctctttaaggcagggcctggaacgattctcactcccccaacatcactaccaccaaatatatgctcctaattaagcaatgcgggcacatcgcttacaattagaattatgcagctcttcagcaagcagccatcgcttctctttcaacgaattagctccatatttcagccgccctgtcttctcgctcttatcggctccagcgactcggcggtgacatttcatctttgacagaccttctctattttcactccaatgtgataaaacttttatggaaccacaactaagaaatgaagttttcccaaggatgatggaaacagagccgcacattagcctggggaccgttttatttacgcttggatccaacagcttctcccaccctcctctcccctttctctggcaggggaaatcgaacgtgcttcccctccctccgcctcgagttttatttagtgatttaattttacttagttttaaagtttgacctgagaagtctaggcctcagttttgttttttttttttttttagattaatcatttttctttgttttcattttagacccaatggtggttgggcttcgggtcacgtgacaccttctttgtggctccggaagaggattgtgaagtttaggtttcgtggaagaaaccgtaatcggccagattttcttggtggtggtgggaaggggtggggggtggggggtgcatggacgctgtggccaaaggagctaacagacgaaaggtcaatgaatgaaaaacctagaggcatacaggccaaacagaaaaacctacagagagcatccaagagtcccccgttacctcccaacttgctacttaaaccacagctgaagaagttggcaaaatgttacaggctcttatgagtgagaaaatggtatttaaacttaagacatatcaagggggagacaggaacctgggcagtggacaaaaaggccagggaagggtcttcagtgtccttgtccttgtccttcttcccttgggggaaatttggcagtcagcagccttgctctgctatctaaattggaccaccaggacaagataaaattgataacagaaagtttattcaagaattgtttgacagacaacccttttaggtaaggaaaaaagtaactactgaagaacaaagaaagttccaagagggaattaactctagttctacaaattcaggactatacagtgacgattaggagctgagttcatgccttttagaactaattacaattgttcgtaagtacgagtttaacataaatctacagctcttttctagagtacaatagtaactaaaatagctggttttacatgacaggaaacacaatgtcctttgtaacaggtaaatactaaaaaagtacaattttttcctttttttccctcatataaatacataatgtagggggataaataatacaaaaaagaaaatattttaacaggctataaccaataaatatatatgaaaatgttcactagaacacacgcttttttgagcaatgctggacttctgcaggcccagacatctctcacagttgtttttacatccattaaaatgtaaattctaagtgcaacaaaagtgtcctgtcaggaggctgagcaaggcacacaggccctgcccagcccctgcctgggacagtttgttcaaatataccctgttttcacgttaagtcaagagagcaacagaagaaaagtatagaacctcgtgtcaccaactgctttctgtggagagggggatggagctggagctgagatggaggcagcagaatgggcaaaccttcagtcctaacaacctgcctgccctagcctccacacttttccttaaaaaaaaatgtatataatttataatataggcagctctttcaggatctctcaccatccctgagccctctaaaaactgtaattgatgggggtgggatgtatagatatgaatgttctagagcagaaaaaccgggggctagaagtgtacctcaataaacctcaaatgggaacaaatttgaggttttgggaaagttggaagggaacgtgttttgtgccttttgggtttgaaatgtgttttcttattttttaaaggataattgaggaaaaaaaaaaatcaagatttggggggaattacctacaaagatgtaaggtaagtccgttggttggtgatggcctagccatcttgtctggtttttaaaatgtgcttttctgcctcgtcctgtctcgtcttcctctaccccactcccgggcgtggaattccaacttggtagtgctggagccctggggttgatggggtcatctccaatatgatgtggattcctttccgatgggttggcaggcagatggaacaaggggtggaagacttaaaagcaacctctcaggccagggggaagggaaggagctccaggccggttctgaccaggaagcctgggtaccaccttctctggctcctcttttcagacctccaggttgccccccagagctccacagtctctctcttcctccccatcccctaatcctcgttcgccctttcccatcacaggtgtgttaatttgggcgcttcttggattctaccctgaggaggaggcgcgtggtgagaggagaggtctgtgtaggtggggtggggttcgcagggtccgtggtgctggctgggcgccatagggggcgccccgttgtagtccaggttcccggaagggtgatgggaaaggtggttgaggccatagagggaggggccggcagggggcggcagcggatccgcgtagccgcccccgcccacgtacaccggactgccctgcatggtgggcgtcccgtaggcgcccccgttggcttggaggacgtgcggctcatactcgggcgccggggtcggagggtacttctgcggggcgccgcagcctttgagagggggctggtagttggagggcagcgcgtaggcattctggtgggctttaccgaaggcgggtggggacgggctctcgtagctgggggtcatggagtgtaaggcgttcatgaagccggccgtggactgcatgggctgcggggggctgccggctggagatgggccccccgacgacgaggccaatcccttggccttctggtccttcttgtacttcatgcgccggttctggaaccagatcttgatctgccgctcgctgaggttcagcaggttggccatctctacacggcgaggccggcacaggtagcggttaaaatggaactccttctccagctccaccagctgcgcgctcgtgtacgccgtccgcgcccgcttggacgccgccgaccccggggggctcttgtcccctcccccgccgccgccgccaccgcccccgctgccaccactgcctccgccgccgccgccaccgccgccgccaccacagccctctgctggatccgagggggaggggtgggaaggggagaaaatgaaataaaagataattactgaacacgccgaaattgaatgcatcgtttcttaataaatccaggcctggactcagagcccccgccgccctccccttcgggtccccgccgcctcctcactcccccaccccaccgcccgtcgcattagcggacactctataatagtggcatttattaagagacctgttctcctttcgctgccccagcttatgaaaatttgatcatgtcacgcagacagagccgcatggccatttatttagggctggattttcgcgtgcgtgctttctcccccttatccccaattccaggtcagggaagacatttcccctccccgcccaccccgtcctgaggacaggatgggagactgaggagaatcctcggggtaatctggacactcgtgggcaggaagtgtggcacgaagaggctgccgtttctggaggccgggaccccgggccgtccaagcgattgtgattaatacccacagtaatcatacttaataataatcaatcgttgacgactctgcatcctcccggcagcgcctcgtcttggctctgtggccttgggaagggctttgaggccacgcactgggccttctggagctttcagaagctccggtggagggcagctagagggaggagggtgttggcggggtcaggggtcattagggggtaggggtatcaaaaatgtacccgctggccacctaatattgttcccaggcagcctcgcgggcgcctaggggctgggtgctagaataacagtgacattcctggctccgacaaaagctgaggacaaggaaggcagagaactggtacctgtgccgggggagttgtttttcagcttggacgtttgcctcgactctttcatccaggggaatatctgtttggtgagggtggagttggtgccgggaccgcactttgggggaccacttttgctgggcccgcccccattactgctgttgctagtggcactggtaggtgcggcactgggcgggggtgagccaggcggggccgacaggggctcgggggccagacccggcctcatgcagctgccgttgagctccttgctcttggcatgtggggcagcgttgcccagggactgcagcgagcaagctgagcgctggtagtcgccctccaggtgcgtggcggcctgaaatgggggttggggggggacatcgaagccgaagccattgctgccagggtacgaggaatagcctccgaagagagcagccgcggcgttgtcgtagtaggtggctttctgcatcgctgggtgaggcctgggcagtgggtggcaacttggaaaggcctgataccctcaggaccggacattggcaaccctgggggtcacgtgacacgccggaccccccccccccacctcccctctctgcccccctcctccggggtctgttccaagcggctgacctgcgaggcgagagaagagacacaagggggagaagaggactggggctcgaatccatcttaggaactgaaaagggaactgacatcaatagggttttttcttttcccctcc

SEQ ID NO: 264 - DNA, 18951 bp, Homo sapiens
  source 1..18951: mol_type = genomic DNA
ttggtgagctgaatcaagggatggcaggctggtgaaagtaggagtgacagggtagttagccccacgggtgttaaattggaggggggtcaatttggtggggaagaagcctctgacttttagaagggtgacttttccctagaaaataacagaacccctggggatcaaatcctgaagtctctctggtttatggttctacaaaacaaaggggactttgagggtgtgcccagaaaagaagagggaaaaagagaggaaaaaagagcacctttcctattttctcttccagctcctgaatctatttcctcccgacagttgagggatttgtattcttgagctgattttatttgaggagggcttgccagagttctacttaaacacctaacacctctaggcaagagaagaagctcttcccttcccccactcctggttcaggaattaggttttgaattgggggaattgccctctctgtctgctccctagtctgacttcaggatcctacttcgagccaaggagaaagattagcttgagaccaacaggctgaaggtggaggcaaaagcagcgctgtgctccccatcccagagaagcctgatgaagccaaagataaccggagggacctctttttatgggcttcaaagatcggaaagccagagatcaccccagggcaaggtagcccacagcagccgcctacccggtgctttttctcagctcagatgtatccagataaaagtgcccagcggtgcacccccacacacctccgacaaatgaatgtcataaagtttctttccggaggatggggggatagttgtctgaagatatccagcagtgaagtggcccccaccaatggccccttctttcagcaatatacacccctccttcctggtccctaaatttccgctggcactgagggagcatggatcccccacacaaacccttttccccacaaagtcagacactcctgttggtaaaaatcaggcacccccgaccgatgaggccttaagaaactgagagcactcatttcaggcacccagtcccttagaactgggtgcataaaacaggctaaatttcccctacatcaccccacagccccaggtggaaacaagttttcttcccccagtcccaggccccagaattgcaaggggtaaaagcgaaagctgaaagcgacttactgcgggaatgctggcctgggccgccgctgccttctgggctggtccggctgctccaggctgggagagtgctcacctacctctgcccccttccccaccacagcgagcagttaaagtgtcacttaacattctggagaatgtgaaatatactgcgcggtgtcaactccccaaaaccataaaactaactttatggacctcacgtgactttctcgagccagtgaggggtatctgtctgacttctcggcgatttttacgatctaacttcgagataaaacccctatccatttgacatctaaatgtcatagcgacttttgggatagtttgctatcgacaaagggagacaaagtcaaggggtgaagggaaaggagggccaagtagagcctccacgaccctcggcttcctcctcaccagctccccctccctccaagtccagtaagaagttgggccaagctggaagggattgaccgggtaagtgtccagacttgactcttgtgctcagggtggaggctgacttggatggaggtagactgggccctagccctgggccaggctgaaagggaaccaggggtctttctgaaaggaccctaactcctaatcaagagggaagatcagttgggcccttggagagaaggagcccttgataagggtagggaaggctgagggtgagagaaatcctttgaaatccagctgaattttttttttttttttttttgctttagttggtggcagagctgaattgggacttggagtaggagacagggggctgggcaggcctctaccactcccaaaaggccaggagcctcctgctgaggacttaggcccaaattactttcccagaagagttttccagaggcttccttggccagctagtggaagaccaggatgaagtctagctcagcctttcctctgccccagccccacatggggtttctgggccttggagtcccccaggcatgaaggtctgttccctggcccaagcactgttgaccaagccagtgacttacatggctgagaagagttgttggggagcagcctactttttcttccctgcaccccagatctattgagaatggtgcagggtgtgcccgggatgggagaggcagacccctcggagaaaagacaagtggaagggcaatggagtgggggaaacatttatttgacttccaggaaagctacaaacaaataccaaaagcgaatcactgagacaggccccgcaaagacagatttcacacgtagcacagcatccactcgctcactacaaatggtcttggaagcaagatgggtaagggagagatgggtctgacccagactatccccatatttacaagctttgggccctctagccagacccatggattcacagagaaatacacaagacattttgcactgaggatcatttttgtttccgtatactcccagaccaggccttgtggggcctacccaggcagcaggaacttaaatctcactatcttctttctctcttctcaataccatccctttggtcctccctagccccttcccaccctaggaccaagcccctaggagacttgggcctagggagtgaggagggaggaggaggagaatgaaaagggactccatctccgaagccagctcagcttgaccccactgcggcactaccccacctcaactgctgccccttacagaagtttccagctgaaactcaaaatacagcgatcatctttttataaataagttagaacacagatggggaggggagagttcacattaaacatgcgaatttctttttttttttttcctgggggaaagactgcaaccacagacacaaacattcagaaacactggcggatttgggacaagcagaagggagttgggagcatggaaggaaaataataataataattattattaacaataataacaagataaccagtccaggagagagggagccacaggaagacctaagaccaaacgaaatatcgtaacacaaggcgaggcaggcttgtgggaaccggtccccagcgggcggcggcagagcggggaggattggaggggccagggctgggggtggcacgggctcttgggccgctgggctcctctgggcgggctcagggctggaaggcgctgccagctgtagccaggctcatacttttcaatttgttgtccttcttccacttcatgcgccggttctggaaccagatcttgatctggcgctcggacaggcagagtgcgtgggcgatctcgatgcgccgtcgccgggtcaggtagcggttgaagtggaactccttttccagctccagggtctggtagcgggtatacgcggtccgggcccttttcccgtccggcccggtcatatctggagcagatagaggaaagccgcaaggcaacattattccggttaagggagggggcactgggtgggagggggcgggggagcaggacccaggcgtcccggcacccagctcaccacagctccaatcctctctactccagatgcccacattcaagctcgatttctgcacccctttctactgcatcccccacttctgcaggcagccagtgcgcccggctttgtctcttgctcgctcctagtgcctcacccttggctgggctcaggcggccgctcgccccgggagggaggagagcggttgcacttttgccccggaaagctccttttactgttcaccccttctttgctagcgacagtctcaaaatttcaggggtaagcaggacccttccccacattatatgaaccccatcctttatcctaaagctggttcagctgcgctaataaaaacctaagccgaagctggaaacaaattattaaaaatacccccctcttaacagagagaccctttttggctctgtctacgaagctatgaggcccctcttagatacttctcccccttagaaaaatgaatctatatttagggtaaagccaagctctccttgtccccccgatcccaccccaaaacgcagagaaggaaagccgagaagacaaaaaagagagagagaattaccatggctgatgtgaagcttcctcatccaggggaatatttgcggagtctgcccctcgggcgcggctgtggaggtggccatgggctctggctgcgcccgagctaggctggggctgcttagctggcttgccgcttcctcaggctccgaggacgcgctggcctcgtctatttcggtgaaattggcgctggagctggctgaggtcgcctggtcggagggggacgaagcagagggcttggcgccgtggctgtcgccgttggtgcagggcagggactcgggcgaggacagggagcagctcgaagccgcttgcctgaagcggggctcctgggcgggcgcggggaaggcgcgcgagctctcgcccaccgccccaaagtggctggaggaggccgaggagcggttgacgctgaggtccatcccattgtaattgtagccgtaagagccggtgtgcatggcagcgggatccctgtaagagccgctcagagagctgccactgccataatttagcaactgatagtccgggccatttggataacgccccgagaaggagtttacaaagtacgagctcatttgggtgattttggagggcttgatttgtggatcgtggtcgttataaccctgtgcttcacgatttatgatgtattaatgaattatagcgatgcactgtacttcgttttgctatgtatgcggccaaatatggggggggggttggaaggggggtggggggcgttagggaatcacgtgcttttgttgaccagtcgtaaattctcgctgatgacctcaagaggtaattcatgctctatggttacaaataatgacgatccgagaatcgttagggccgattcaatgcgagcctccgagagagggggaaaaaaggagaagggggagaaacagagagaaggttggctttggcctctgagcagagcgcgccacctcccggcgaccgacgggagcgcgggcgtgagaccgccatggcggcgggcggctgcctccctgctggctccctgcaggctccctgcagtcgccgggagagaaagaaacccggccaaggctcagccacagggttgagccttttagagcaggggttgggctttttacccactttcttgtgggtggggttagcctctctatttggttctttctccctacatcatcattgtcgttattattttaactttggatgagaagatcaaagatagagttgcttttccctttcttgggctttgcaagtctccgaattggaggcggaaatgggggaagggttggaagttgtgtgtgaaaaacaattattgcaacgggttttccccaggagcttagtccggcctgcatcctggtggaactgctgttaccggtccacagcgcccaggccgagccggcagggctgggcgggaggcttgaaaaagaaggagaagcgttcacttctcctgggccacttggaagttcgaaatccccttccggacctccttggtggtccttagcccaggcgtggggagtgacagagcaggacagggaccccagaaaccgagcacagctggggctaagcggcctagttgccgaaaagactgcagcggccaccgcgtctgctgcttagtttgagtagtaacatgtgtctgagagtttgtaaagcgggatcccttcccctcctcctcggctattgcattcggaggccccactacaggtccctcactcgcagctaggcagtttgagaatttgcctggtggcagccgccttcccggaaaaggggttccaaggacccgcatgctttgctgagcacgctgggcggccagagaccgccgcagctggtctcctattaggaggggactattttctttaaaaataagaaaggaagcgagagggcggaggaataaaggaaaacagtgaccgcagcttgccttctgggtgccggtgcaagcagagagagaatgagccattctgggttgagaggatgacactaaaagccccatcacctggcctcctgccctggggtctccaaggagcaagggaaagttgtggccttcggcctgtgcctggctggtggctttacattcccctacttgaggctgatctcctacttgaggctgatctgctacttgaggtgggaaggggcacctggagccttcagctgcagggtgagagatacccagtggccccatttttcagtctccagagccacaggccaggagcggagggccaaggctggcgaaaaaacctggccatgtggacgggccaaagaccaggggtcgctgcgaaggtgaggacagaaaagcgctgcagaggcccccagactatggctccgtctccgccagagagctttaggggcctcagtggctcccttagtgctgtgtatacacgaggaaaggctagagaatgagagggacacagcacctctccatcccccaagtctgcacggggagaagcggctgtgagcctcagcaccagggaaacgcagcgctggggcctgggcaggactgatcgctccagcctttatctcagctgtaacttcccagtcgaacagggctcgcttcggcgggccagggctctcgcctttgctgaagaattctggctcaggaaagatggagaggctgggggttgaggagagaggaaaaaatggcaggggaggattggaggtgaccgagcgtcgagttttcacatctttattattgttgttgttgttgttattattattattattatcatcatcatcatcatcatcatcatcgaagtatttcacgtccagagctaagacaagactacaaacacaacacatagaaaattaataaaatagaactttgttttcttctgaggctcctcttcttacttctaggtagtatgtgctccttccagtggctttggggagggggtgggagagacgacaggtctgggatcagggagtcttcaaggcccccgctgaggggacagcgaatctaccattgaaccgtgcacgggggacatggacaaaatgagacgcgacagggacaagagcattttgctctgcttccaggaaacatcaagtgagtccgctcctcagttctcaccaggaagcctgatcaggctgaggcgagttcctcgggaaggaagggcgcgcgggatgctgggtgggctcgagtagtgaggcctcagagcacccgccgggagctgtgcgggcgggggcgtccaggagagcgctgggccccgcctgtctgcgccggagagcaggtctcctggctcccccacccgagagccttccttcccgggtctctctgacgccctcggctccccacaggcctttcccctcgcgtcctccctccctttccagcaccttcactcggcctgtttttcttcctcctcctcggcactgagctgagacgcgctgagcagtttgctctcctttttccacttcatgcgtcggttctggaaccatatcttgatctgcctctccgtcaggcacagggcgtgcgcgatctcgatgcgccgccgccgcgtcaggtagcgattgtagtgaaactccttctccagctccagcgtctggtaacgtgtgtatgtctggcggcctcgccggccgctgggcccaaaggaggaacctgttacgcagagtggagatgctgaggcctgcggtcaccgggcccaggaccccctcccctagtcgaccctcgaacacagactccagccagtaccgggatgccctctattctgccggctcccttcccccgtttcgcactcctccagcgccccctccagattccctcctagtctcctaggcctgtgccgtctgtctagactctagatgggggaggggaggagcagtttgaactcccacctgagcctggggggaggggctggtcaggtgtgtctcttcctagttgcatcttgtctttccctccctttccatccatcttgttcccaccccccgtcatccccccaacccaatgataaatccaggccgttaatccgtaatgacgtagatcgatccatagtccacattaacggctcctcactttcgagtccggctaatggacatcagttgggacttaaggccaacaaataatccaacctgagaccccgcgcctgtttctccctctctcgctccgcctgctccctctctcttccttccccttattcctcctccctcctctgactaccacccctttcctggtgcctcatcttgccccagctccccacccacagggaaacacagtcccagacagactcaactctttctcttcagcgtcaccccctacccccttgcatgacgcactccgtttttaatggagccgtctttggttggggaaccctaccagggctgggagaggggggttgggggctcaaagtaaagccaagccagtgactgcaggctcctgctcccttccctgtcctggaaccccggctctggccaggcgccccaggagagcacacttgctccccatggctcccagtgcggctgggactttgcaaactttgtaactcctgcctaataggggacacagcgagagacccccggccggcgcccaatcttcttctatctcctaactgagatgcccacccagcaccctgtgggagattggggcagggggcgctcactagttctgtgtcccggggtgggcgcccaggggagccggggcgacggcgacgggaagtctcactcactgttgcacgaattcatccgctgcatccacgggtagaccggagtggagcacttctgctcttctgtctcgccgaacacgctcttgtcctgcgcgcagtccgacttccgcggctcggggtggaacgggggctgctcgtcggcgccggagagtgcgcaggccgactctttctcgcggtagaaggccggcgccggcccgtagtcgcagggcgccgctcggccgtagccaccgcccgccggcgggtaataggaggaagtggcaaagcccttgtcctggcccggccctggcccgtagggcgcggggtaatgtctcagcgggtccgcatagcccgacgaatagagcggtagctggcccaggaaggactcctgcccgctggccagagtgacggggaaggtggagttcacgaaataggaactcattgggaggggaggcgcgcgcggccgctgctgctccgccgggtttatgatttgttgtgttttatagtccgagcgccgcgcctattagtagtatatccgagattgggttttagctgaggggggatggcgaggtgccagtgagggccagaaggaaatacaaccatctgatccaacactgaccaatggcagaggcaggaattgtcaaatagcacccaggaggagcgcagcccgcacgagggacccgcgcacaaacctatcaacctttttttttttcctccttctccttcgcctttctcctctctccccccaacaacacaacgcgtcctgttccacctacgtaggatctgtgaaacaggctcagtgcctttgagggaggagggaacgtttagattgagaccaccccactcccgggtgattaaataaatatgtctctcccccaccccacgcaggattggaaaaagttaattgtgttttcagaaaagttaacccctgcgttgcttcgaccccttctctccggggagggttgggtaaatgtctccgaatcgccttgagagagaactaaagaaggtttgtttctagggttttgtgtcggtagaaggtgagaagagttctccgctaagataagcaaagaagaaacaccctcctccccaggttttgaacatcgtttttcctgtttatcagatctgctctgtctcctccaagcctcggcttattgttcctgcttctccacaacccttctggtctgagggggcaggccagatcccactgcctagaagacccagaagaggaggagctggcaggagggactgagcccaagcttccccttctgactctgtggctagactaggagcttcttggaaggcggcgacgagggtggctgcccaaaacattctgcctggttctagtatgcagctgctcacccttggcaggggaaggggcactggggaaagggactagccctctcctcacttggtgatatggagtgaaggagtgaggggtatccctcagcctaggtggctttatttgtctgatccctatcctgcctgcaaccctcactccagtaccctctacaatcccaaaagacttaagaatagcctgggctataggattttcaggaatcagggatgtcccagtaaatctgggcacaaggaagaaatcattcttcttccagttgtgggctttgaaccctcctgatagttgaggcagtcagagaccactgggaagaaatgcatcctcactcctcttctaagtctctgtaggagctgccagttctttttaaaattaattctttcccaagacttggtttttgctttagtttgatagggagagaaggtcgtttgcgttctcttggggactcagcaggctgcttccagccatcagccagcatcccctctcccttctgtctgtatctcagcatcgctacaattccctcccacaccccgtgtttgtatcatcagctttgccgccttacaaatttaggtgtgtcagagaatgtatgtctctggctctttcatccaaggaaaataagcattgagcccaggctgggagacagggccacagtgcattcccaacattctaatatacatacacaggccaagtagtgaagggtgacaaccttcacacctggggacaagaaggggccagggcatggaacaaagtcagatgtcaggccaggctgaccctcctctgccttgtccttcctttgggctcctttttctggccaagttctgcccactgaagatggtacaagacactagggaaggtggcaggggactgagcttggatcaccaagggtgggaacttatttggttgcaacgtggtctccaaggctctctaaactcagggcaacttcttggctgtaccttaatggcaaaatagccatccctagatggcctccaattacttcctaacctgactctgtgggagtgtttgataagcatttaagaaaacaaatttaaaccccctgataatgaagaaggataaatattccatatctaggtatggctgggcttgcttctagagaggactaggggccatttgaacagggggagaaaagtgggagagagtacctgcatgcacctccctgcctactgctgaggctgagccctgggcctcagccttccctgcctcctccctgcccacaatgtctccatcctagcactaaatagtgtggttttctcagtgaagtctgaacaaaataagatctggtgaggaagggagcatttccctgtgtcagaagcagggaaataattgccttatctttagagtcacagcccccaaattaacctcacctctgcaggttgcttgtctggagatggagccactacaggcgggcctgggcgcctggagtcgggcatgaaagaaaatagcgcctcatcgctcttatctaagcccagaggtatttatgagcgtttattcgtctgatccgtttgtttgggaaaaagagcaggcgggcagggcaggccagagaccgactcctttctggagccagatccctacgaatctgtctgtggttcggtccaccgccctctgtctgtctccttgggggaatatgtaaatacacagcgggctcagccatccgccagtctggggtgtctctccctgcctcaatgaggaagtgtgtgttcagagagatggatagaagtgtgtaccaattcttgagtacataacagagggattgtacagataccccacaggcaggatttataattgtaattttctatgctgtgagtctgcagtcctgtgggcaagctaacacattccagctcccaggaaaatgtttcctaagttgtgttcagttcgggagtaaaattcttgataggtaacctcaggagggatatttgcgtgtgtgtgtgtgtgtgtgtgtgtgtgtggtgtggtgtggtgtgtgtgggagggtgctgagacattgtccaggcttccaatttcctctaagctataaagccctctccctcagctctttgaggtgatgagcaccttctcccaccacccccaactttggctggggtggggtgggatgaaaatatttcaactcaattctcgtcctggactctgtttctctgggtttggggaacataaataaatgttcccaggggtactgagtgatcactcccataggttgagggaggctgtttagatgagacactttgccctaaaatcggcccctccaaatcaaagtacaaagacttcattttcattatgcaaaggagcggcatcctctttgatctttaggggagtgagcagtagtgctgaacccactctcccggtttcctacccgcaggtccaggggacaacctgagggccctgaagtgtttcaataccatgtaccagcttgacttctctacatgtcctttggattgcccaaaagcaaaatctcagaggggccaaggaccttctagggctggctccctcagggcctcctatagagcagctccttgagtcgggccttatagccaccagaaagtcacctcgccgcaggaaagctataaagagctgctccagaggcgccgaaagagggtgagggctgcagccacagtgtttgtccccagcaccaccaggccccttaacctcgtcagctcctctagccctcggccagactctggcaacaccttggtttgcctggcaccgcaggcaatttcctggaaccccacccccacccaggaacggggaccacagcacctttaaaggaactgccagagcttcctcctacggcttgaaagcccaagctaatcagtaacccgtgagacaggggccaatattcaaacgctgcagcagaggcgcatagcctagccctggccaccccctcttgggaaggaggtcgagttaagccggtgtggagggtccaacaggaacggaaattacgacggtgtggttccttaaggatttggccccagtcccactaccaaatttttcccaaatcatatttaggtagacttcgcttgaaaagatcgagaatggaggaggggatcggcactcacttgcagacatcaacagtttccagaaaattcggttcaattccttcaccacggacccaccaaccaaggagctggcaaaacccactaaccaaccaggagaacacagacccggtttgtcttttgacaaccgagtggaactgacggggccggcgcctgccctgcgggtcccctcccttggctgagaagaaaaccaaataaaccttgaacagccttggcttcggatgtctcaagcggcctcatcctctcccgcgccttggtggggtgggggtggggatggcggtgggggtgtcggctctgatccctccaccctttgattcagggcccctgcccgctggaagcagaattagacctttttatatatgccctagaggaagccgcttcccttgccagccgccaggtttggggctaggatgggcggggacgggggcagtgggaaattggggatgatgggtggaggagagacttctgttctctaactcacaccggggaaccaagatctagctgagagcgtcggtgtgggcccgaaatcccccgaatcccgtggaccctgcgaggccggggctccaggcgtcgggcacctctggacagtgtcgcggggcttgcggcgccgaagccgcgtgtctccgaacggacggtagatggcagcagaccgcataatttgggtcacagcgaactgtctaagggaggatttataaccctccaagactacaggagaaaaagacctttagtatgggtgggtttgggaaatttttcccttgagaatagtccccgagtgccgtgggtgctggcggagaactctagctacgaagcccagcggtccctccaggcgcccaggccgggcctgaacctagggcatctacctggggccacagagccgcctcttccgcgccacaagtggcagcgtcgtccctctcctagcttaggactgagataataaatatatccccacttccaaaacgccccagaccctgtaactccggggcaaccagaggcccgaggctgaatgtcctgcatctggtcttaagaaagagaaaagcaatcacatgttcgtgcaaaccagactaaaaatcacaatttctcctgccctccacagccaacatcacttatctcttggctggaagcttccccagaagctcccttaccccatttttaagtccttgcctcaaggctggcacctacttccaccccacgagctactttaggaatctctgtcacctgcccaatgttctccgccctccccaccccctagaaggcctgactgagggataaaattggacacccgagggacgggactgtctgagctcagtgccagttagcttttcagtttagacgccgctaggtcccataattggattttctttttattttcttctttcatttctttctcttttatttttatttacaagcctaaaacaaaaaggcacttaacagcttcttcacaatcaccatgtctggacccaggaaagtttgaaatgttatcatatcagacacacacatggcaattttttcctccaccgaaatccacacatcccataccaatacaacgcaagtaatagaatcagtatcacgcagaaaccaacagctgtaacctaccgcattaaaaccacaaaactgtctccctgtagagcgaggctccctcctgcgggagtggcgagatacttgggcattctcgggcaggcttcctggtgaggggggagtctccctcatttttggtgtttccacccacagccctttaatttcaaaaatgtctccgaagggagatagtaaacatttctctgtaaattgtcttttctgtgtttctctagccgtttcctctccctcgccggcctcggcggagattccaggccctatagaaaccaggacgtcccttagcgccaccgcctcacatgccagtgctgccgggaacccagcgatatccgcaccaggcaagagaactgcgctggggcaatagccagaggccgagacaagggagggatggcaggagggggaggggcaagcccgcggaggccagaaccactggcttctttgggtgccactgaagcccagataccccccatcctctctttcgcaccccccttgcttgagtctctcctccaagcttaaaaaggcgacttagagctggtctcctggccctcttttgattcctcttcccgctttccctgccttggctccccctccaggaagcagccacccatatctccaccactgaatttcctgggaagcttctccctgcagcgcccagaggtggggttcagccccgtcttggaacgggggaggagggagaaaaacccaagccccacccccaccctacaaaagcgatgcaaaagaacaagaagaaaattgtagaatctcccttacctttgcagaccttgggattttttccccctccggatttaaaggaatgggtggggaggaaggaaggagtattcagtttcttcttcagcttccagataatattgtcccaacgtgagagccgttgcttccccttctctgacttgggagagagggtgtttcatttttctgacatttgcatagaaaatggagtaagttctggctttgaaaaatagtatcgggctgcagtcctgggcagattgtccatttaccctccatggtgactaaaatcccagatcagtgagcaaattaacttaggaatcaaaattatttttggttctctctttgtgtaattcccacccctccttctctccctctccctctcgcgctctctctcttttctcctcacccccctctctcgtcctctctctcttttgctctatcgagctgatactgaagtacaaaaatatcaagaggctggagccctgaaggacgacagtgctccgacctaggtgtggtgtccaaaagaatgctgcattataaccaccagggaaatgataaaaagttcatgttcacgatcgcccggccacatgaccggcgccggccaatcgctggattcaaccactcataaacttctatcacaaagttgtaaattttcataaaacaacaaggaatttattgcatttcttcatggctgctccaccagcaacccttttctcagtcgccatcttcttttcttctccttctctctttttggggaaaccccaatctgagaaggggtgagatttgggggggcaggaaatcagagtgcaaaagccataacggtacagctgggaagggggttcttttccgaacctccccactctccacaggagctctgctccctcttctagtaaaggtctaccccaaatcctctgcatagggactgttctgagacaattttggggtgaggcaggagcaggaaacggtgtctagagttgccacctgcataagggcaaaatgaaagcttcagtgtcccctctccccctctgaactggccccctcattcctagccctgtagacagcaggacccccacctgtgaggcttgcagcattgcaggcgtgggggccttagattccctagggcttagtttttgccccaggaggaaaagtggcctggatgggggccaaggcagatagtctgacaacctgattctcgcctccggaacccagaaactgggggagggtaaagccggatcctggcttctcccgcccaaatgcaggcaagtccaggtttcctatgacagctccatgcgctctccagggcgttacgtggtcattaatgggggaaactgcaggtttaaaagcattttacatacaaattcaaattcaacagattatcctaaaaccaaccctcttccctctttctatccaaagtctgtttaaatttaaacaatccagagtttataatcgaataaatgctaaaaatcaattcagcgggtctagccgcatagacaccatcctccaagttttggtcctgcaatcagcggatgtttggaagcaaaaaataaaataaaaattcagcccaggtttttcaggtcccctgaaataaccccgtatttcaagttgacctaccaatgcccgaattctggaaacgaaataacctcccccaacattttcccccctctctctctgtgcagcggagaaggttccaggctgccggcggcggcgcagagagcgggaagagaggctcggaggaagccccgggcgtggcgtggtcaggctccgagagcggccgggatgcggccacaccggcctggtaaactcgcacctcttaggatcttgctcccggactcattcccttccccaccccctattttaaagttttatttgggtcgtctgtatcaatttagaacgagataaattaagacaaagaaagtaaaataaatcgaaataaaatataggaatagctcttggcgaaaatgtttgccgtgcgagcaggaagccgtgagcgccctagttggaggctgctctgcgccgactaagaggcctctactcccaggcctggcctctacgcaacgccacccaagaagccagagtgaatttgggtgttcattttccctttccttccgctcttccttcatgtggggcctagcagcttggatttcagctccgtctttgtgcctgggctgcagcccagatccagatcccgcagcttggtttccaggcctgaatgaggacgcgggtttgtgaaactgtgaggtttttgttttgttgttttgtgagcttgtgtgactaagcatgtgggcttctgagtgcgtttacttgggggcaaatgtgaatctgtgtttataagccaatgtgtgaatgtacgttggtatcaatgtgtctgtgagtgtgaatgtgtgtttacttgtgagcgtgtgtgaacatgaatgcctatgttctgggcgtgaagctggtattacgtgaatgcctgtatgtttgttaacatatgggtatgagtgtctctttgtgactgtgacagtgtgtatgtttgatgtcagcctgtaaacacatgtgactgtgtgcatcatgtatgtcaatgggtgtaaaagggtgtaaagggaatgcatgagtgcaatatcggggttcactacttggcagccccccagagcaggaggcaccaagaaaaagaacaaactcagcacagaaatgaagctgcatcagaagtcagagccaaggagctctgggatgcccactcatctctaaccctgaaccccttcccagctttaggaagacacagaaaatagggcatctgtttatttttaattgcgttttatttttccatcctttagatacacacagaatgtaaaagggagcatggggctgggggacgggaagcaagaagcagcagccaggcgcttggggaacacgcgagtggtaggttttggggctccctaaggccccttggtgccgctgctgggaaggcggaggctcaggagggcaggcaaccacagggttagtccagacccacagtccacaaagacagcattaaagagggcttacaaaactgcaagattttacaaagaccttacaatagcaacatagaaaaggggaggtaaattccagaaagctacagaacaggtagataatatccttttcatattgtacaaaaaaaccaaacctgacagactttcctataggtagtattttttcagtgttgaaaaaccaaaatttctcctttctccctccttaaaaaatgtttttaaactcctttcatttaaatagggttttttttttgttttttttgttttttgttttgtttttttacttccctattcgatttgagtttcctgattcagttcccagagctgggcttctcttcctctccctttctcatgtctcttcctctgccctttctccatccctcactcttcctcttcctcctctgcttcagccctgtcttggccggtggtccccgggcccgcggtcttgttct

SEQ ID NO: 265 - DNA, 44399 bp, Homo sapiens
  source 1..44399: mol_type = genomic DNA
agccaagttggttcttatttttcttgtttgcaattccagcttcgagccaaagctctgtttttcaaacttaagctaaattctctttcttggcctctttcctgctagataaataacaacccaacccagccccagagccaaacatggtgcttcatctagttatatcattcagaaaatgttattcaaggaagaagagagaaagagaaagaaagaaaaacccttgagcgttatttgatcccaatcaaactttgcacgctcttatgcctttaaattatagcctgacccaatgctaaattgcttgctgcttggatgagtccagttaaaatcctacttggtggtggggaagggggagggcgtagagttcaggttgcttttttattgttatttattgttgcataaagactataattactaaccttggactgccaggatgcaacataaaaatgaaaatcagccctctctttaaggcagggcctggaacgattctcactcccccaacatcactaccaccaaatatatgctcctaattaagcaatgcgggcacatcgcttacaattagaattatgcagctcttcagcaagcagccatcgcttctctttcaacgaattagctccatatttcagccgccctgtcttctcgctcttatcggctccagcgactcggcggtgacatttcatctttgacagaccttctctattttcactccaatgtgataaaacttttatggaaccacaactaagaaatgaagttttcccaaggatgatggaaacagagccgcacattagcctggggaccgttttatttacgcttggatccaacagcttctcccaccctcctctcccctttctctggcaggggaaatcgaacgtgcttcccctccctccgcctcgagttttatttagtgatttaattttacttagttttaaagtttgacctgagaagtctaggcctcagttttgttttttttttttttttagattaatcatttttctttgttttcattttagacccaatggtggttgggcttcgggtcacgtgacaccttctttgtggctccggaagaggattgtgaagtttaggtttcgtggaagaaaccgtaatcggccagattttcttggtggtggtgggaaggggtggggggtggggggtgcatggacgctgtggccaaaggagctaacagacgaaaggtcaatgaatgaaaaacctagaggcatacaggccaaacagaaaaacctacagagagcatccaagagtcccccgttacctcccaacttgctacttaaaccacagctgaagaagttggcaaaatgttacaggctcttatgagtgagaaaatggtatttaaacttaagacatatcaagggggagacaggaacctgggcagtggacaaaaaggccagggaagggtcttcagtgtccttgtccttgtccttcttcccttgggggaaatttggcagtcagcagccttgctctgctatctaaattggaccaccaggacaagataaaattgataacagaaagtttattcaagaattgtttgacagacaacccttttaggtaaggaaaaaagtaactactgaagaacaaagaaagttccaagagggaattaactctagttctacaaattcaggactatacagtgacgattaggagctgagttcatgccttttagaactaattacaattgttcgtaagtacgagtttaacataaatctacagctcttttctagagtacaatagtaactaaaatagctggttttacatgacaggaaacacaatgtcctttgtaacaggtaaatactaaaaaagtacaattttttcctttttttccctcatataaatacataatgtagggggataaataatacaaaaaagaaaatattttaacaggctataaccaataaatatatatgaaaatgttcactagaacacacgcttttttgagcaatgctggacttctgcaggcccagacatctctcacagttgtttttacatccattaaaatgtaaattctaagtgcaacaaaagtgtcctgtcaggaggctgagcaaggcacacaggccctgcccagcccctgcctgggacagtttgttcaaatataccctgttttcacgttaagtcaagagagcaacagaagaaaagtatagaacctcgtgtcaccaactgctttctgtggagagggggatggagctggagctgagatggaggcagcagaatgggcaaaccttcagtcctaacaacctgcctgccctagcctccacacttttccttaaaaaaaaatgtatataatttataatataggcagctctttcaggatctctcaccatccctgagccctctaaaaactgtaattgatgggggtgggatgtatagatatgaatgttctagagcagaaaaaccgggggctagaagtgtacctcaataaacctcaaatgggaacaaatttgaggttttgggaaagttggaagggaacgtgttttgtgccttttgggtttgaaatgtgttttcttattttttaaaggataattgaggaaaaaaaaaaatcaagatttggggggaattacctacaaagatgtaaggtaagtccgttggttggtgatggcctagccatcttgtctggtttttaaaatgtgcttttctgcctcgtcctgtctcgtcttcctctaccccactcccgggcgtggaattccaacttggtagtgctggagccctggggttgatggggtcatctccaatatgatgtggattcctttccgatgggttggcaggcagatggaacaaggggtggaagacttaaaagcaacctctcaggccagggggaagggaaggagctccaggccggttctgaccaggaagcctgggtaccaccttctctggctcctcttttcagacctccaggttgccccccagagctccacagtctctctcttcctccccatcccctaatcctcgttcgccctttcccatcacaggtgtgttaatttgggcgcttcttggattctaccctgaggaggaggcgcgtggtgagaggagaggtctgtgtaggtggggtggggttcgcagggtccgtggtgctggctgggcgccatagggggcgccccgttgtagtccaggttcccggaagggtgatgggaaaggtggttgaggccatagagggaggggccggcagggggcggcagcggatccgcgtagccgcccccgcccacgtacaccggactgccctgcatggtgggcgtcccgtaggcgcccccgttggcttggaggacgtgcggctcatactcgggcgccggggtcggagggtacttctgcggggcgccgcagcctttgagagggggctggtagttggagggcagcgcgtaggcattctggtgggctttaccgaaggcgggtggggacgggctctcgtagctgggggtcatggagtgtaaggcgttcatgaagccggccgtggactgcatgggctgcggggggctgccggctggagatgggccccccgacgacgaggccaatcccttggccttctggtccttcttgtacttcatgcgccggttctggaaccagatcttgatctgccgctcgctgaggttcagcaggttggccatctctacacggcgaggccggcacaggtagcggttaaaatggaactccttctccagctccaccagctgcgcgctcgtgtacgccgtccgcgcccgcttggacgccgccgaccccggggggctcttgtcccctcccccgccgccgccgccaccgcccccgctgccaccactgcctccgccgccgccgccaccgccgccgccaccacagccctctgctggatccgagggggaggggtgggaaggggagaaaatgaaataaaagataattactgaacacgccgaaattgaatgcatcgtttcttaataaatccaggcctggactcagagcccccgccgccctccccttcgggtccccgccgcctcctcactcccccaccccaccgcccgtcgcattagcggacactctataatagtggcatttattaagagacctgttctcctttcgctgccccagcttatgaaaatttgatcatgtcacgcagacagagccgcatggccatttatttagggctggattttcgcgtgcgtgctttctcccccttatccccaattccaggtcagggaagacatttcccctccccgcccaccccgtcctgaggacaggatgggagactgaggagaatcctcggggtaatctggacactcgtgggcaggaagtgtggcacgaagaggctgccgtttctggaggccgggaccccgggccgtccaagcgattgtgattaatacccacagtaatcatacttaataataatcaatcgttgacgactctgcatcctcccggcagcgcctcgtcttggctctgtggccttgggaagggctttgaggccacgcactgggccttctggagctttcagaagctccggtggagggcagctagagggaggagggtgttggcggggtcaggggtcattagggggtaggggtatcaaaaatgtacccgctggccacctaatattgttcccaggcagcctcgcgggcgcctaggggctgggtgctagaataacagtgacattcctggctccgacaaaagctgaggacaaggaaggcagagaactggtacctgtgccgggggagttgtttttcagcttggacgtttgcctcgactctttcatccaggggaatatctgtttggtgagggtggagttggtgccgggaccgcactttgggggaccacttttgctgggcccgcccccattactgctgttgctagtggcactggtaggtgcggcactgggcgggggtgagccaggcggggccgacaggggctcgggggccagacccggcctcatgcagctgccgttgagctccttgctcttggcatgtggggcagcgttgcccagggactgcagcgagcaagctgagcgctggtagtcgccctccaggtgcgtggcggcctgaaatgggggttggggggggacatcgaagccgaagccattgctgccagggtacgaggaatagcctccgaagagagcagccgcggcgttgtcgtagtaggtggctttctgcatcgctgggtgaggcctgggcagtgggtggcaacttggaaaggcctgataccctcaggaccggacattggcaaccctgggggtcacgtgacacgccggaccccccccccccacctcccctctctgcccccctcctccggggtctgttccaagcggctgacctgcgaggcgagagaagagacacaagggggagaagaggactggggctcgaatccatcttaggaactgaaaagggaactgacatcaatagggttttttcttttcccctccccaacatctccaaagcagatgctgagaaaaaaaagcccaccagttttcatttccactaaaaaataaaaaaataaataaagactatatgcctttcaagactgcctagatgtagaatctatggcaaaggccattgcttctctcctgcctgtgcactagcccctgacctcccctagtccctctctccctatctctcctccccaactctgggataggatggctcaagggaggggacactaggagactccaaaataaaagcatcatcaacaccctcctctgagcccagaggcttctatgcttccagcctttgcctccttccaagtcggtttaggtctcttgcccaagcaaagtctagcctgaaggaaaaccaaaggatctcctaaaagaacaggcaggagaagcaagttcagcagagaagcttctcttgtgaggtatcctctccacttcccaccactctcccaccaggaagacaacaacagcctgacctagaaacttcctgatgatttttaacctcaagagccagctgaaccgagactcatctgtccatggccctgctgcaggtaccaccacctccagcccttgtctttgctcagccaaacctgggatcgggcagccagtggccctgtggggcccccacatggagcaggattgtttcaatttcctgggccacgccagttggtgctgtgaccatttggcccaggtctctccccggacctctttttttttttttcatgagacttaatttttcccaccctttccttcaccgtctgttttctttgatttcccccaaagcaaataagaaacaagaagttacaactgctagacttttctactgagacggggaaagtgctttccaaaagagaaaattattcctgaggaaaaaaaaattaacaaagcaattttaacaatattattctctaggttagaaacagaggtattcctgttgactgaggttccctgaggcaaaaaaaaaaaatcactattttaatacagccttttaaaagtgtgccagaaaaataaagattcaaactaacataggattttgtgtatttgttctgaaacttctgactgcatttttttccctccatctctcccaactcttcaccatcacttttcataaaacctccatactgccatgtgtgtttggaaaactttaatctcattcagcctagctgttcaactccaaagaaaactaaacataggaaaataaaataaaaggagtgcaggtgaagaaaagtccctccctcacataaatccccttcttcatggcacagatttatactcaaaagggaatcagtgtaaccctgagttccgattggtttctggaaatacacatgggtctgcaaagcagcaggtccttccagggagaaccagagttcaattgaccaggctgacccaatccctttattattattaccattagcctctgctgatttaaccaaaattagcttccaagcagccctggctgaagggggaattaattaacaggcattagttgtggttgttattaatagagaagagaatgaaataaaaacgttggagggggttggctggctaggccctggctttatttagtctgattgttacagcaataataatgatgacgatgatgatgatagtaataataataaaacaataatttaactagatgcctggggccgaaattcctgccgctccccttgcaataaaccccaaaccatcgcgggacggaggccaggcgagtgtggaaagcgaaggagccagagacgcgataggaaagaatggagactccgccggtggtgcagacagggctgggaaggtttgtgcacccgggtagtccctggctgctgctgccaggctgcctcagccggtcgctgctgccgcggcgactggcgacaagctaccagccacctacgatggcccaaggaggcgaagaagagcaagcgatcaggacaccaaaacggttatcggaggcaggttcccagcacaccagccggccgagggccgagccccgcgggcggcagcaagttttgggagctggaggtaaccgaattaaaaggcgccttagaaactccgcttcgggactttgctcagcagggctccgggttggagggcgccgaggcctggcggacgggacagtgggaagagagaaaggtgctaaggggacccaagatctgggatccagaacaagagggggtggggaacaactctaccaagccaaacagatctatttcccttgcctccatgttggaaaaattcaggttccatatggctcctcgggagggagggagggagacggtggctgccggcttccccccagggtctcgctggagaagggagatgagccccccgcaagaaccccaccttgccaagcacaccccagggagagccaggagagtaacaatagctggggaagccccgagagaggggataggccatcttccaggacttaaaaaaattaatgggagaaagaaaaataacaagaaaggaagacagagaaaggttgagactttcttagcagccgcggagaaaattcagccctggatctggctgctgaaagaaaagagagagaggagaaaagaggagagaagcaggaagagagaggggagagagagagggagagagagagagagagagagagagagagggagggagggagggagggagggagggagagagagagtcgctgcgtggaaggaagcttaaagcttgtgaactcttcttgaaccgagattggagtcatatgggccataaatcattgagacatactctccgccattcacaaactgatagcctatttcagtccagcttaccttagccaccgacgaggggagaacaggcagacataatatatattcacatcgagccccagagcgagcggcaggcgacaaatctcccctccttgaaggcaaaggaaaaaaagaccactgtttaaagctgcgtcgccccccgcccccccgcccccgccccgcaaagccaccccggctggggagcccgaggggcagaccggccagaggagccgcgcggcgtccgcttcaattcactcggcttaggagcaggggtgcgcaggagggagggggtgggggagcgggaaaaaaaatagaagaccgaaaggtgccgggcggctcagctcgccagaatccagctccgggctccagcagggctaagccgccacagtgtggttgccctataagactggtacgccctactctccgtaacaatggcctctgcttttgcacagggaaaaaaaaccacacagacacacacacacactcactcacacacaagctcacacccccccacctctccccctttagcaagcttagatgcctgataaggagggaaggtgatggtggtgatggggaaggggggaaattttaaaatacccgcctccccaaaaaaagagtaagaagaaaagaaggagggttttttttttttccttaaagaacaggtaaaaatttaaatctagattggagggacagggaggaagaggtgagcaaaggcaaggaagggcggtgaagttcacagctccccccataccccactagtgaactattatgctaatatgagaagtagtatttggaggctgagtcaaaggcaggcctggcccgggggtgagggtgccgggtgcccctctgcactcattcgcaattggaacaccaggacttttttagaaagtagttctgggtctccaaccctcacactctggctccctccttctgagtctccagccccggcttcttccctccactacaccctctctattcctcccaaatctccctccagtctccaggcccagtctctaaccaagggagagggaaagaccagaacttaaaaaaaaaaaaaaaaaaaaaacacccctccccctttttctttttgagaacagacaacaagcggtgagtgatgattttaaaaactctgaacatcttgcagggggaggagggttgagaaaagggtgacaaaaggaggactctgtgttttagtttgagctccagactggctggcagtagacgggctgaaagaacttcatggataagtttctgttatgattctcacctccgaataggcagaaggggctaagaggtgataaggacatttgtacttctaagaagagaagaactagcagggtcgcttaattttaaatgcactggcagaagagatggaagatggttattattattattcagaacaaccctgtttgtttctctctgccctgcaagatttatgactcttggcacaagtgaggaaggccacaaaagctaaagttttcttagggtgtgtttgagcagggcaggaaaaggcaaggaggaggcctgtaggaggaagacaggagccaaaaatgtaggtgtctgcagatttgggacagggggtggggaatagtcattccgggaggaaggaaaagacaaaaagagcaccaggacatttcccaaagcaggagtgtttgcaactctgcctaactgctgactcggagctaggggatgaaatagaaagctgactcttttctctaaaggcagcttggaaaactggtcctcttaacttcatgtaaggcactaccctgtgatttcctggttagaatacttggcttttgccttctcccatctggatgcaccagaagagggaacgggactggggacaacaaaggtgagagttgatttccagcttttgtgttccctccagcataggttggaggtgtctggcaaagcttccctcattccctctctctccccactcacaggctctactttgggatgagatagggagtggcccctggcctccagcccctacttcttccaggcaaggctaagtcaggccaggtgatttggagcagccggtttccaggggccctgataaactgggggtacctatggccttcctgccctccagcaacagaagccacttgcagagcctcagaatgtaatgtcctgaggaccccacctcccacctagaaagttgacagctggggggaagcacgggttgggggacatggggatggagggtgggagctatttttctgtgtttattagctattattctgtgtttattagtatttttctgtgtttattagtagtatcaagaaaataaaacatccaagtcagacctagacttggggctcaagccagcctggaaccccaaagagacctgttaggggtgcctgagcatgtggctgcaaaaagtctgtcctgagatctctacactctggttagagacctacagggtcagaccccatgtaactttgagcttggtgggtcagggactcaggccagggaggcttccagaggcttaaagaaaccagtacctttggggtttttttttctatcactcccccaaataaaaaaaaagccaagaatgtacctcaaaacctctgctgtcctagctgttactatcattgggttagagaaggtcattgtaaaactgagagaagaggagaacctgatcgcttttgggactgcgcagctttgcctctaggaataacacgagagtccagaaggcacccaggcagcctcgggccggctgcaggagaagcgggcctggagctgagctgggagtggaggagtgttccagagacaacagcagacccctcccttccccaagcctcctcaactctttgtggtccctcgggctacagaaggcagtggggcatagtggggtgggagtgaaaaagaggaccgagaagcaagaaaatgaacctggagaaaatctcagaggacatatacccccaaatgcggtaggagatggagtgggggcttcttaattctggagtacagagcccatttggaatacttgggaggcaattagatcccagtttagtttctgtcttgccttttttcttccattctcagaggtctctggcgagcaggcgggctgccctctgattagggctgggaggctggaggacggagggtggaacaggcacccctaagggcccctgtttggactgaggtgttgctgctagccaggggattttcaaacttcaggggataaaggctggtagtgaggagtttgagcagggaacttggggtgggggacgccagagcaggctgagggaagactttggggtctgggaaaagagaagcaggagaagggcttatcatccctgagagtgaagccatgatttcggaacagactggagatacagaagagggaacaatttcttcttggatttgggagggaaacctggaaaactgtgtgtgtgtgcccatgtgtgtagggtgtgtgtgtgtgtgagagagagagagagagaaaggaggagaaagagaaattgaaaaagaggaaaattgagtaagagacagagacactagcataaactaatgaagtaaaaaaataataagggtaaagattagagaaaatgcccttcttcacagacatcttttcctcttccattccgtttcttcagagccagagcactcgctctggcacttctctcccccaccccactgggtacccagtatcaggcgacgggagcactttaaaccctctggaacaatcaagggctacccgcccttctagacctcggcggcgggatcgtgcctgtttctctcctcccccaaaaatgcatcaactagcaaacaaaaattctctcaataagggcatactggttggctcttttaaaaccaatttctgatctcagacttggggcagtcaaggatcctgcccctggctcaatccacacaaaatttgcctggcccaaaggctagcttgggagctaggacctgtaagcctggggcgagatgtttggcgatgtgtttcttcctggccctgtctgggttcccagtcccacactgttttccagcttcactgcccaactttgtagccctagaaaagtggtgtaaaggtcacacactcacccgaatctccattttcccctaagtattaacgaagatttcaaagctgggagttgtaaagtgggaattgctaatgaagaaggctcttggcatttggatccccatctccagctctccaataagccagagcaggagggaacaaaggggcacccggaagggagaagaggagactcgcatagacactgctcagcaatagtggggatcaaaagaagaaaaaggtcgctgcagtggaagaagaaaaatccaagctgtactttttccccaccccacgtgtgggggcgctgccctctccccagctgagcctgtgaaggggtggcaggacaaaaagggcagccacaagggtctgcgaagtccactcgatgaccacggaggccgcctgaacatgctaatgaggggatggcggtgctgccagcgagttgggagcctcaggcaggtgggctccttggtggtgatagatcccaatctgaatcagggctcccgcctcacctagaagctcagccttagcctggcaaaccccacccccagcaagtgttgagacaaaggtgggcagagcagagaaggcagaggaagggaggctgcaaatcctgggcagcttgggggctgcagggggtgctgggaaagggagggagaagcaggaaaagaggaacgggcccagtccctgaggttcagcgggcctctcctgacagactggatgtttctctcccagtgacctctgtttagcagacaataactcagtggattaatgaccaatcagcgaaaggccttccgaattgcctccaaatataaaactccgaagtcagaatgggacagagccagagtctgggcctgccagctcttttgttttttttttctctctcaaattagtgtttggggctaggctttaggaagtggattatctgcccagtgtctcagatttccagagccccaaagatgaggttgtttcccatctcttcccatcttcttcttccctccttccccggaattcatattccaaaccacacttcccaaggcagcctggaaacctcccctcccctgctagcctcttcacatccctgatcctgcaagaaatttccttgctcacaaccatgcaattgagaagccaccactcctttggaactgggggaggagctggaaaataaaagcaagtatagagtgggagtcttccaccatgcaggccttctgtcctggctaccctagaggagacccggtagagtgctgtggcaccctgtgtgtgcttcctcccaagaagccagggctcagaggcccagggttggggtgaggctgagaagggaggcacctgctatcacagaatctaaactctgaaaccactgttcagtccctgggctggggtagggggcaccttaaaaaccacactctgttgggaggccgaggcaggcgatcacctgaggttgggagttcgagaccagcctgaccaacatggcgaaaccgtgtctccactaaaaatacaaaattagccaggtgtggtggcgcatgcctgtagtcccagctactcgggaggctgaggcaggagaatcgcttgaacccaggaggcagaggttgtggtgagtggagattgcaccattgcactccagcctgggcaacaagagcgaaactccgtctcaaaacacacacacacacacacacacacacacacacacacacacacactgaacaatgacagccttagcccagtgcctggcagggaaagactcttgctcagtaaggcccagcccttctttacttagcccttctccaaatgccaatctcaacccaacccagctagctggcccctcaccacttccttctagttccactgctctcctcagggctactcctcagctgagaataagggcaccttcagaaagaggaatagtccagattccagtggatttcctagagccagactgagtaagcatccactgctctgggtgtatgtaaactctgaatattgcaaataaacatgcagtaacttctatacccagatgcccacagagctccaggacacacaagggagtgcctcccatgcactgtcctgctgaggatgggtacacacagaggtgcccaatttcagaacaggagagaaatcaggaagtgtccagtccaactcttgccattgttacagatcaggaaactgaggcccagagcaaggaagtgatttgtctagagtcatacttgggataggcttgggagttggaaggcctgaatttcagatgttccagcttggctatgtgacatgaggcagggcactccttgggcctgagtgtccccttctgtaaagcctgggcatgtgtatggagggaaggggtttagctaaatgatctctaaggtctctttttggactgaatgttagtgattctccatgtgctgatgtaaaagtgagtgacaagaagtaataaactgagttcagacaataacgggcaccatcgtcaccagattcagagtatttcctcttgaggtttaaatgcttaccaccactgagcaccaacccgatgcctggccctcccttgccccatagaggctcatgcactgcgttttactgctcttctgtgtgtagggtgggttgttttctaccctcattaccaaaccaaaagtgctatatttagacactgcaacttgagcagtaaataattaattagtctaattaaaggaggaaggtttcaacctggcaatttttaaccaggcatcaatgcacccattgtaccagccgagccctctcacccgaccccctccctgcccatacacctaccagccttcccagttgcctccccctcagttggagacaagcattcccccagatggccagcagggtccacagggccagactgtgtccctcatgacaaagttccacgctctgctgtgcttccccatagaaataggtctgccggcagctgcacctcaaagcttgctttccctacccccaaagctgtgctgggctccaggtctctgctctctgctcttgggaaatgtgtaatctacctccccagctcaagatgccccaacaatgcagcgagtttgcatttcaagaaactcccattaatatcaatttacttcactgaaacctcgggttcttcatcaagttgatgatttatgataaaatcaattaaattacggccacttagggcccagccgcttcctctcagatttcattggtgcggggcccaagtgtctggtggaaaaatgcaagtttagctggaggcgaggaaagataattctgcggctgagaaaatttaatgcaaaacaatttccaggcaaagctgggtgtctggacagaaatgcaagagccactagttggcctgcggaaattactatctgggggtcaaaatgtttttctccccaccgccatcctcctgcatggctcccttactctgctcgtctttgtattattcacttgctccccactcccaaacagagattttgggggaattcgagcagtaatggtgggacacaaggctgccaaggtccagcctcaaaccacggatctccccgatcttccctaccacaccaagccttttctccttttggcctcccctcctcaaccaaccatactcactaattccttggcttcccaccacaaagttaaaaattcaaagtgaagatgaggctgggtgggcagaaggcacaggaggcacacagggaaagggtagaggggcaggggccaggaggccaggccaagtgggctctgctgcatgtggctgcgggaagaaaaaagcaggaaagagcactacttcgtggacaggacaaggggcagtgtgtctagagctacctcatcccagagttccagaaccagagaacatggggtctctctcctgactcccaatctcccagctcacaaagtgattctgcaaacccatccgcaaagccccacctggagtacatacagctcccgatgtgcagatgcactcacacaatacacaaacatacctacacatgtgcctgcttacatgctccctttgcatacacccaccacactgtgcgcctgcaaagggacagttcccactattctccctcatctgggaaaataaatcccagtgcgtcaggctggcatcgcttcccactccaaggagaggggcttctctggcctctgctctgtttggtttttggtttccagagcaggcaggagtaaacacagcttctctgaagccataaatcaccccctttcctaccttctgggcttaacactcagcctcagtgcaatcccttgtagttttgccttcaaataacccgctaggtgctaaagggttgggcaatggtggcagctgggttgtggaagctgacccagcggtcgccccccaaccccactgcccctaacagatgcccctcacatttccctcagtacccacagcccccaactgccctggaaaaccctcctgggcctcaacgccctttctgagcgggagggctctcccatcccctaacaagatcatgtccacacgcccacccaaacagctccacattcctccacactcgtcctccacccccaggtccctttacccccttgaagcccccaccctgcctttcaaagttgctctcatcttcgtcttcaattcggatcccggcctgtcccaggagagaggcctgggggcgggggtctcagccacccacctctgcacccccgccaggccccgagcgccccggctccgcaccccacacttacctgtgcggtcttccgctagggcgcgggcaacggcgggcggccgggcgctgggtgcgcgcgggggccgactgccaggccccggaccctcggcccaggctggggctccgccgccgcagccagccgcatcctagtcgctcaacccgcagcaacccccagcaacccccgagcgtcccgccgagctgggggagaggcccggatgcgctcgcccccaccccgcccccgcccccgcccccggctttgttcggcctccagggccccaggagcgcgcggatctggcactccgggcgcggcagacgccagtttcctgagaagctcccactccgtccgggccgcgcagggctgcgggaaccccgggctcgtctggcaccgagctgaactcgggctttgagagcgggccaagttgccaggcgagaggagcggcaactgacaggggcacggcgaggcgtagggagcgccgggggcgccatggcggaaggcgggcacaccggcgactcttcaatgtcaccagcgaaatgggttccatatgtccgacccggcagagaagggaggggaagggagagagttctgggcaggacaggagtggggacagggagggcggcaatggagggaacagagcaatggcgagggggcaataggaaggatcagacgggcgagaaagatttgcatctccccttttccctcgagttttctaaagctgcttaggctggtaggaacttgctttctctttttccttttcttgttctttcctgtaagatgggggaggaaggagattagtaggggaagcatccgcttgttaaggctgggagtttgagggaggagatgtggaatggaggtgaaagttcttaggcggctggaagatcaacaacttccccaggtccctagagaaaaaaagagaccaaacccacaagggggaagaaaagccaagaaaggattccagggtccaggtgtgaaagtcccaactccccccacccccatgatgaaattctgtttggggaggtcccaatgattaagttactgatgctggtgattgtggtggaggctgaagtgtcctggacatcttggccattccctggcacttcagctcctgccacagctgcctcacacctgatttagcacccccaagggcctactctagaggcagttgtttctgagatggcctgggctttgggcagcttcctgtaaagaaggctgctagggagcagggagcctggaggggcttccctctgtgcctgctccccaaagggtttgggctttttttctgtgttgggtctctctgtcttttctaaccatctctgttgtctccgttcctttctcacagcccctttgtctttttccaattctgcgtctctcagtgtcttcagtgaatttgaattgagccttgcaaaggatttaggagtgtctccagaaatcacttctgggctcacccattaggttgagtctcttcttccctttcctctgtgggggaacccaccctctatccagagaaattctcttctagagagaaggggacaaaaggggtagtttccttcccactgcccttgttctcacttaactctgtgtgtgtgtccccttgtgaattgtggggctccttcctccaggacagcctcccttcccctctgactggcctttgtttccactctccctgtcatcacctccttgggctcagccttgacttcccatcccagaaagggatcctgctgcttgttctctctctgggtccctctcttcctcatctcactcttcatctttctatccaattcctctggtcactaaagcgttagcagcctgcctccttaaaggcacagagataaacactgcaattatatagagaggataccagcagagagttaggggagaagacagagtcagcagctttcttagagctctgtctaccagatgcattctatcccaacccctgaacaacacaaaagcaaatcagtggggtggagggtgcaggactggtaagagacagggtgcttcatagctaaatgaagcaaatgtatatataaacaacaaagtcctttcaaacttgctgatttggggtaggcctagatgcctggatggaaggcattaggcatcacatgggggatttaccagataatggtggcaagggatggtccccttgctttgtctcctggggaagagtctgtgcgtgttggggaaagggaaggggagggggtatcagtgtcacctcctctcctctgggccagaggagacaaagacctgaagagggctgaaagaataaagaggaaaagctggtggagtgggggtgggggtggttggtcagacttccacgtcacaggcaaaggtagcagcaggaggggagatggaaaagggttggggaggaggagttgcaaacgcagggggaaggggcctgtgggactggctctccatgctagctatgggctggcccaaagagcagatccttttctttcccatctttcaaagcatgctgaattcagaagctaatacaaatgattctaccctcttccttctctgtcatgtccctcctcctccccatggaagaagtgatccttccctgctctctcaaaaactccaagactttgccctaactctggaccaccggtttgagggagaacgcaccctcttcacagtcataccccccaacactttccagatgagggagaagtagaactgcttgcctctcacactgaatgtgtgtgggattctccaacactcaaggagtgggtggggaatgagactgaaaggtttggagcccctatgccccaggtctctttgctgcctctgccagcccttcccacctcctcacaatctccagtgctgtcaaagctgcccctgtatccagacttttccctagttctttttatccaggtcagacagtgcctctacccatcccagccttgggtcctggccttctctttctccccaaacccttttcaactgagactcctgaattgggaggcttcacccactacccactgagaatcccttgttaacatggatgagactcagtgttcacttggagcagagtgtgggagcgagctcctggatgctgcagggactggggcctaagctgccactccacgtagtggatgccatgaataattaacacctgggcgcggcgttgctctaacttccctgctcaaaggtttacactagcaggcagagttaaatatcacagataatcgtggctataaagtcagttggcctggctccagtcagggaatgaggggccaacagctgggactggagttggtgaaggctctggccctctgcacctcatccatcacaactttggggcacagtgcagaacattccccaaagccacctctggctttgctcttgaccagcagcctctcccctagtaggaaggaactgtgacctccacatgaaactataggagaaagttaacagctcttcccctccctctccaatctgcaccccgtttgctccctttttggatggggacttagttaaaagaacacacccaacatcctccaacactcccaactttctgggaccacctgattcctagaacatttcttttctagaaaaacttcggagaacttctccccactttagccccaaacacagagtccctcactgctgaggaaacttttctttgtttcagcaggtcaaaggaaggctcctggggtgtgaattcatttccttgttttgttagccaggagggtggggagccaaagctttcagcttctctccctgcccttcaccctctgcttgcctccattgtctcccccaatttgggtgattccttttccacctttgaccaccccccagacacatcagtcctataaattaagctttaataatgtaacggaacccctcccatccctttccaattgcacagaactttgatttggtctccattgatcacaaaaatatttgccttcaactccagtaatttctttctccacttccacctctcttactctaaggctccttctgccttcagagttgggtttgttcatccagggctggagttggagaagccaaactcctggaggggagctgctaaaaaatggagctctgtctgctgctgcaggaatgttggctctatcaggctcacaaatataatttttatattagaccatggtcattgactgggtttatatgccaatgaggcatttctggtttaccaaatttatgaaaatctcgctttaattgataatcacagatgctgtaatttaagacctccagctatagagctttcatattaactgctgatatattactgtaaatcgtctgaaataaccaactcctgggagcagagcagagagggaggaagtgcctccgagagcgactctctcccggccggccgcagaaacagcccagcttccacatcattttccgtgaaaaatgatttatcgaagacatggccataaacaacacaactcgctcacaaacacacgcagacgcgcacgcacacacacgcgcggacacacacacacacaatggctggcatgccggctgagaagctgacacccatattgctataaatcaagaaaaaggttggaggacagagggagagagggagagggagggagggagaaagagagagagagaaaagaagaatattcctaaaatctctatgcaatgcctcaatgggcataaacacacagagcaccgtgtgaagagaaatggcaggaaatgaagatggctatttgtcacattttacgacaataacattaataacaaacaataaatttacatggacatataagacgcggtaggtagtgagaaatcccttctacttacaataccccagcccgcggtgtggctccggctgcggggctgttttattgctgtctccctttctttctctctctctctctccctctctctctcccccctctctttttttttctcggggtacaggcttgtttttcaaaggacagttgaattgcacgtcagaaacagggagaccgagcctgcgattttcctgacgaatacatatctattctgcaacctcggcattaattatttaatgaatcacgtgaccgggagggggaagggggtctttcgatttcaggctcaaaggaccactatgaccttccccttcaggaggagaaattttcctgcaaaataagttccccctcaacccaccaatggaacagtagtgaggtctccgtctgtctcccacactcacatccatacctactacatctgcagctccctaacccccatggacacacacttacccacagcccacctctcctctctcccttctcctcctgcttctgcttagttcgtggaggtgcagaaatagtctgcaggggcgtctagggggtgggggtggggtgggctcagagcccttctccaagcccctggatttctcagcttccagttcttctctctgcatcctttaggattaaggttccctccccaactccattttttccccaactcctggggatatttacttgagtgagacccactccctctcttcctaaataatggacaaaatttctgaaggagccactttgaaaataaacacttcataagtccatggtataagtggataaataatggggcttctggctttattctcgttttgatcttttctggtaccttttgaaggggcaaaaaagggacagggtgaagagattactctggagcttccagagttgagaataaccgcaagggggacttttttccctgttgtgttgttactactataggaaatcaaatgcgactgaccgtttgaaaatagattctagagacaaagactgggactaaggtttctacacaaaagaatcggactgtcagcctctctctacctatgtcacaccctgtctcatttcccccccttcccaaacccaccagtgaagacagctggagatttgaacaggagaggagggaaaagaaaagaaaagctttgaagtcagcctggcagccccaggatccctatttcccaggtgttagcaccccgagcttccaatcaacaaacaatggaggctgatcagtgggaaaaagatgggggatggctatgcctgttaaagggttaaataccagggactatctattccccaggcctaaagagagagacacacacagaccccttcaactcaaatataaacaaaataaaacaaaaacaaccccccatccaaacttgaccagttacgtgcaactagaatcagagttctcggccggggcatgggatggggggtggggatgcaaagggaagcagaaaagacattcctgaagaagtcgcagccttatctgtcctcagcagctctggaggcagccaggaccacagcctccggggcaggcagggaatccaggaagaatgagcttcagggtacgggagcaggggtctgaggggcctcccccggcttgttcgaaggggtctaaaccaaaagcaactcagtggagagaaggttgaggacccggttgtcttaacaagccccaaagaaacagccaccccggtgtcggcctcggaggttccagctacagtggcagctgcacagcttctgccccagctaagagcactggaatctgctctggcctcatggggtgggggcgccggccaggcctggactctgtaggggaggtggtcagctttgattgtccagatacaaaacacagactggtattgaattcagcctgatcccgatgtgggccctgctcccggctccagcgagggcaactccctgaaacgttctggccacaaatccattaaaaatggtcctccagagaaaaacactctgctaaagtctaaaatgaaaatagagagagagcagagagaggagagagaaatgctggatgtgggaagacagcaatctctaaaacggagaaataatttttaaggacaagaaaaagaacagcaaaatgacacgaaggcacgccagcaggttctgttaaaatgaccatactcttttcggatcctgggaatgtccacgttcaaataaacaagcgcctgatcgcgagccgagcactttcttgctgccgataaagcgaacgtttacactgtgagaaaggcgagattgatttacgaatctgaacgcgccagttttatggctgatcacaaatccgtcagcgctcaactcacgctgagaaacttcccaactccgttttccaaccagaccccctccccagctgccgcttcccagggagacccactgccagcgctggggccgccttcaagggctctggcagaactgggcaaccccctctgcccaggacaggcgggtggaagtaggagggagaatggggagggccgagggaactggggagaaagagggaaagaagtcaaaaggttgggaggactggagtggcactaggattgtctggagtgaaggaaatgggagatctggcagttccccttagtgaaccccaggcttccctgactatggtctctctccttttccctttggtgggccctaatcctcacattgcagaaagcagtttgtaaagtcctcggcgactaggtctttgtcacttgagcctgtagaaggcccacaactggctatctgcccttacaggtaatgaatacacatctccctgagccccatatatttttagtccaggagcagcctagctagctttgtgctcatcctctgtctttcctgaggcctccagcccctctacttatgccacccagggacaaaggagagagtatcaaccactccagttatttcttgcctgagatagagtccccaaatgtcaagaaacaatttacaaaatgcaaaccaacaacccacatatcccagcaaggttctgtctctcctagtcttaactgaagggtaacatttcatcttcccagccagcgtctgtctgtatctgtctctctttctctttctctttgtctctgtctctccctaagagggtggctgctggtgtggatttttaagatacagcaaacagaatacagtttttggaaaggctctatgttcagggctcactgtttggcaaatccttcacctatttcttaaaagtttctggaaactttggctaacctgggacagcaggccctggaaagtactcagaatagcctgcactgatcctcctcccatttcccttgctcctctggtgggtgaggcactccaagggcttttttcattattgaggagattgagaattaggggaaagaggtaaaggtagttatagaaatagcttcctcaacaaatgaacttcagaaaatgggttgacaggctgtggatttggatgtcagccctcagggagatgacagcctctgaagcaatgttcagggcggataagccctttctctcctcgcagcccaggagtttattcccctggccctctgaagccttgtggattaggcccctccaacctctcatatcttctccctttgtctttcttccctcagttccctccaggtgaaatagtaaagagatgaactggacctgggagtggttgcggggaggatggctggagcctggactgctgaaggtgctgtgtacagagagacagattagcaccctactttcgtcccccaactggacccttgggctaaaaatctttacgtttttttcccccagtgggcagtaatagaaaaataatccaaaatttccaaaatagcaaagatgggtttggggcctagagggggatggagaagatgggacatatgatgggccaaggacccctccctgcagaggtgtgactctccctcctgggcaggaggcaaatgccaacacaatgtccagtctcagcgaggtcaaggggcttccgaggtcattttgtggttctaatactgagctaatcgcctagaaaacgtggcctctccatgaactctctctcctgccagcctcccgcctccaaaccctaagtgaggcctcagggaaaaagggccaacacattcaggtcggctgcagagcccactgactccctcagcctaagaaacagggctgcagaggagagaacagagacctcaaattaggagagcaaagggaaaccaaaccaaaccaaaccaacattgctcctccaggaagaaggctggggggacagagcagaagagaaatatttctgcatcagtccaccttgtctgtgaactgagcagtttcctgctccagagagtagcacatatttgtctagaatcccaagctagacacaagaagaaaaaaaagaacatatccacttatacccgctccaaagctggaacattccatccaagcactggatttgatttttccaagaggcagcagtgacaacgtctcactggtaaacaggcataggggacaccagtacccagtgtagacaagcagagtcacaggaacacaccgaccacatgtggacctcactagacacacccatgcacacatgctggggctcgctgtgcctgcctgcattttccaaaaccagaaaagcgcttctgaactgcctcacaaaacaaccgtcttctctggggtttttcatgggccctgacacctcagtcccaaccagttcaaacactctccaggtgtcgaggcccctctttctctccctctgacccaagcatcagtcatcataaaagggagcaaacctgctgaagcatccaccataaaaacccagccaagaaagttaaaaaagaaaaaggaagaggcgagagagtgtttcttctttcagttgtgaaaagagctcataaaacgatcaaaacacgccagcccgggcccgggctttgttacctttgcgcctctcgcctcctctcgcccgaactctgcagatcccattcatgacgaagggcttcttccaaactgagagaaaaaagttttcaactttatggttccaaattttttcccccttgcagatccgggagagacggctaacacttttttcccccaacagccggtccaaggagatttgctgttgaataataacaaaggagagaggatacgtatttaaagaaaagaagtgattaatggttttctgtataattctcacatttttcttagctcttgtctacacagaatggctgtgaactttaagctccatagaaatcttttttttttaaattctattcataccttccaaagagcagctttgatttggttctttagagacattccttaggggggcatatgctttttaagaactattttccccctcaactggggctgcggcatccccttgcagctaaaccaccacaccgcaatccgaccgaaataaagctcgcccctctcatcctccaggtccacgatgatttttttacgagtctcccagcagcatttaaacggacagttcagcagctcttttgcggctggggacaccggcctgtcggttccccctgccctacccagcctccaactaccggagctgcaagctggaggaatgcaaaataaataacaataaaacgcgcgggtgggattggttctttttattttctgaaaggagatgggactgaaaaaacgacttttaattgcatatgctctcccgagccccgagctttttggagatgtggtggctgcaccctggatgaccaatagaccagagaccctgaggctggagcccccagaccttagaacttccaagcagtgctgcacaaaagcaatctgagcctgacagagcttctgagggtcacctgcacccctttcccctacccccactccattctaggggtgactgggacctcagagacagaaagctatttggtccccagtcatactttcgatactttctatgagaaagaaaatgaaaattaatactggagcaaggcttcacaaaagaggccatttgtcttcttgattatctatttgcttgtcagagtttgagctatggcactggctagcttctttgtaatataaaaatactctgaaaacctgcaaacacccagaaacatctgtgcaaaaaattatactcattaaagccttaaacacctcagaggaaagcgataccttcttatgctgcgaggaaagaggccagcctcatggaatcctctctcggaactttaataaccaaagagccttctgtctaaaaggagacagcttaaccgcattttatttgcttatgacaaataaatcacgatatgaaaggctttgccgtacttaagcctcttgtgtcctacaatgaaacattttcccccattagggactggaatcagccttcccagtcctttcaatccatttttggactgaagggaaaaaattaaaagccccaaaacaaaacacacccaccctaaaaggaaaacaaaccagccaccacaatttggagtcctctgagataaaaattcccatcagactctttgaaaaaaatcttcaaccacacacaatgtggggctgaacccagtagggtgcttaaaatatacactgggtggcatttgtccatatctttacgccaatgtttcaacaaaaacacgctgtgctggtcacaagaaaccaaacatttatttctattgtcactctgtacagcacacagatattcacacatacgaagggttctagactcaagcagccccagaggtaggaaggggcctggttttggaatgtcagaaagagaaaaggagagaggactcacatgacacaaaaaaatagtaataataatattatcaataataataataaacgatgcaacataataaactatgggagagggctctgcaacatcctcctcccagactgggaggggcacattttatttcctagtttcacattcattttcagtctaggagagaggcttctgctgtacaactctggactggcagagtagtgcccagctcccagaactcaactggcccctcaccctgccaagcatggcttggcttggcctttcagaggaaggccctcccgggtctctgagtctctctttttccttggactcaattttcctgctcactcctgagttgtcaaggccacccccttccctacttgctcccctcctctgttgcccacccccaaccccacggtggaagtgggtgagcagtcattctggccctcagtgaatgggcacgaaagatgagggagagtgtgtgtgtgttaccgtgaccaaaacactgcactatctggcagtcagagggtgctttcgctgggtatcgggagtgggggacaaagaaaggaaatccaggctgtcttccagcagcggcagtagcagaggcggaggcggccgagccgggcctcatttgttagcgggtgtcgaggtaatggtcgccaccgaggcccgtcttctcctcggcagaggaaacaagacagatgggcctggacctggcgtgattaaagatgaaacgtggatccatcttcgccaaagctgaaaacgaggagctgcagcctcctcctatttctctttctgtctttttctttcttccttcttcttgctttttctttttcttttttttaagaaagaaagcaagagatttgaatcttgcttctgggggggcctccccgtggccctctattgtcatttctataaataaagcttcccctccccctcttctgcgtttattcgtatataaagtgtgggggagggcagatagatttttccggggcccaggccccagggccccctcctgtccccccaccccatcccctgcactcactgcccacccccaccccgaggttcgtggctcccgcgtgcgggggcactagagcgcgcgggggcctccattgggccggccagggggccctccggctgagcctgccgcaccacccgagcggatcttggtgttgggcaacttgtggtcttttttccacttcatgcgccggttctggaaccagatcttgatctggcgctcggagaggcagagcgcgtgggcgatctccaccctccggcgccgtgtcaggtagcggttgtagtgaaattccttctccagctccaagacctgctggcgcgtgtaggcggtccgagagcgcttgggctccccgccggcgtaattggggtttactggacacacacggagagagggagaaagagaaagttttattgcccccgaaagagagagtcctttcttccagggaacacagcgtttccctccctccctctcccgccacctcttcttccttctgagggagagcggggaaaaacgaaaagggaagaatgcaagacccaagaatgagaaagagacctccaagttttggagggctgtgctgtgtccttgtttgggtgtgtggtggggaaggggggcgtgtgaggactcccccaaggttttaattgctcctctctccccctcagcttggggcccccagaatgggagaatgagggggtggaagagggaggggaggtttccctaaacctttcctctgtttagttcccacccttgctgctcagattccaagcagtgcctacccctactgaaaacttttgctcacttctccagccaaggagtcagactggaagaaaggaaaaaataaatactgggagttgactcaactctctgcttaaatacggattacctcctcctccttctcctcctccacctcctccacccctccccaacttccaacttcattaagactgtatctccctggcgaaaaagtcgctggtgagaatggtgaagaggatggggaacctacttcaaaggcgcagggcccaccaggccataaaaatttatgggggatgtaattatgtggctctgaaaacaggcgaccgtaaatctccggcaatggcgagtttatagcggggacaattggcttccccagctcaacccccccccaacccatgcctccgaagtccctttggtgtaaagctccaggggtgggagggggaaggggtgcccacgcactcacccgtgctcacgtgaactttgcgcatccaggggtagacgacgggctctttgcacgcggagtgggacgggctggggtgcagggggttctgggcgcagggaggcggcggggggctgctgctgaccgcctcgcagcgctggccgggctccgggaggagggccccggcgggtggcggcgcaggagcccgaggggacagaccgggcggtggcgggggcggcgggggtggtggcggaggcggcgggggcccagggtcccggcaggccgcgtagcgctgcacggtgcacgccgcgcgccgcccgaagcccgcctccggctggaagctgctctctcgcctctggccgccggcgtagtacccgggcgagtggtcgctgggtaggtaatcgctctgtgaatattcctcgcatggagggaacttggggtcgacatagtttgagttgatcaaaaaagaactcatagccattaatttctgggaattgcccacaaaatatactaaaatttattccgacccctgactcgttttcctgtttccgaaagccctcctacttactgtcaagtgaacaaagttaggcgcccacgtgatcctccgagccaatggccgccccgcctgcgattcccggataaggaaatctgctcacccggaccccactccagccaaagaggtttatttccccttcttcccttccccctccccacccacccacccaacaccaggatttacatagggctcctgcggggcgaccccctccttgcctcgctctctccgggatcagagagagagcgagagagagagcgcgcgcaggttgcgactggagggcctgttggggcgctaggcagagcgcaaaccctagatcccttaagaagttggggctcccggtgtagccctcctgttctgcctcacctctgcccagcattctgtaccttccaaaggccccagtctcctcccctcggcgggagggagcgctagcaccctgcgtctctatggggagttaggttactggcgggttgggggctccgtctcgaaaggggaacccatacgggggccagagcacagagcttggggcttttctctgcagctggatggggaagggtaggggtgagagaggaggcgtccagagctagagggcgggtgcgcagagggacttgtcagagatgaatggaaccgcgggcggatcgataggaaattcatgcactaattcggggagacttcgccttccaaatctcatttagctgcacggttagctagactgtgtccgtcagtccgtctgtcccccttctcctatccactcctccctttaacccacacggcccaagcctggagaaacgacttggtttcccacactatagacagagcgctggggtaaaaaaacctgcaacttttgagagcaaaattgattagcaatttgctaattccataaccacccgagcaatactaaccatgggtccgagacgttctaattgtcgccgcctccgcggcgaatagaaatctcacatccctttgatactggggatacagccatagaggtgacccacacagacaataacactccttggtaatcgagtatttccaggtcatcttgttctgaactgaaacggaaaggcggcctcagcatccgtttgttaaacaaatttcctttgccttcttcgcacactgaagacaagtcattttttttcgcaatttccaataaagcctccctgagcccagaatagaaaatgggtgcgtttgggacgagaagataaatttaaaacttcaacaacaataacattaacctcttaaagagatgtgaaaagggaccaaggctcccaggggcaggcgtggggagagttcaggtagatgatttctccatctctaaccagttgaaggaggaaaagatagaggaataaagaggaaggagtcttcgtgtggccagtcaccagactgtcctcattcagaaaaatactacatatacatatatatatatttttttcttctggaaaaataagagcggagtgtttatgtcaactacatattcccctagatacgaatttgtgaccacaaaattccttacacaaattcggatctacagggtatatacagaagacagacagatcttcttggcccagaaattttccagttctcctactttccgcgccttcttcgtttggggtgtggtttgagtgctttggttttatttcgttttgttctagttttgagctctgggaacagaaaaaggcagtgcgagtctgttcttgggattacaaggttttcaattctcctcttctattagaatttcaagtagccagttcgcaaagggacgagaaccttgcctccgccgccgccgcgcaactctcggtggcgcatgaattatgagatgtaaacattagctaagcacaaaaggaggaagggtcattctgaggctgccacgaagtcagattcaggcctttctgggtgccttcgcgcccctcccctccccccaggactttttttttttttttttttttagaaaaaacaaaaccccaatcggctcctccgtgcccctccaagcctttagtttgtgatcaaacgaatatctagatattttccaaagcgcctctcagcgaagggaggaggaagaggcggctgggtgtgaaggtggtgtaataaaagtccttttggaaaaattcagtggtaaaaagagagagaaacagctgtaaagaaaaatgctgggagaccaagcagatggggccccggatatttaatgacgggcaattccgtttacaacctgagaaaagatcaaaggcgtttcatttccgaatgaagggcaatgaggaaccataaaagatgcagccagatgatatagggcccctcccagcctctcacacatcctgggagccaggagagagggtctatcccggggaggtgtggggaggaaccccatttccccaccttcctagccccagacgggtcctttccttctaaacacatatgaactcgcctagccacctgcttgggttgctggtggtagggccaaaatgggcatctggggtttacgaaccaactttctgaagctcccagaagccgtgaatttactaagctgagagtctggggattgggctggagggaactgagactgtgaaagctgtgacagagtaagggaaaatgtgcatagaaaaagcctccaccccacccagactccctactcaactccctaggtctgagaaatacttgcatctttagtgaggaagtcaaaataatatcaatttcattaacaaatacaggaacaacacaaaaacaaccctctaactgcaacactccagagatctctgcctatgcccagtcctgggaccttgcaggtgggtaggaggagagttcccacctgcccacaactaggtccagagaccctctgattttcttttaatcttaaatctaggaattgccaatgttggcctctgggcctgatttctaacatcaacattctcccagacaggctgaactcacacatatttgggagaaaaaagcaaactatcacactatggttgtctttgccaagagagggtccaataggtaatctcagacccccatctgggcactcagggagactagagtctggcccagggcccacagacaaaatgcgctgctaggatccccaccagctccctagcgtcaaccagggacctttccaaatcttgtcataggccacttagggtctccaggacccactccaacggtccaggcccctcccccaccccatacctcctgtccttctcaactcgccagctctcggaaacccgtccaacccgtcggcatttcggaagtttgggagggccgctgggccggcggccgggcctctctgctgctctacacttcacaagggatgcggcccaggtgccccagcaccccaagagagaggaacaggcggcagagccaccgcgggtttgggtatccttgatcctggcgcccaagagcagagatttttctcctctgcgccctggaagtcaccacctgccaatcccaccaaggcgccgcacccccctcacccctccagccgcctgagatggagaacagggtttatgggcgactcccaggacgggtttcaccggagcgggaggctgcctctccccttcaccgcccagaaggatacgaacagcaacacgcataatagtaaaataagagcaggggctgcgcgcgagctgagccacctcccctgcgctcccgggtctttccgtggcttcccagccgccttctcctggcagccacaggttgctagcgtgacctcgcccctcccagccaccctccgccgtccaggcgtgcccagtccgctaggaatcatcaccttttgttggcggggagaagggactcagcgagggagcgaaaccgaaggcccgagcggaggcgagtccccagccggcctgcgcaccggcggcggcggcgcggaggagagaaaggcccagagggggcgcgggcgagggtactcaccgggaggctccccagccccgccggccgccgagccgcccgcggacgcgccgggcaacagctgagctctctcctgtccactattgtgtgtccggaaaaccggaccgcggcggcggacacagccacgggctccctcagaagccggaacgtgacttttttttttggtgtgtttttgttttggaagcgcaagttttcgtgttaatctcatactttggcagtctttgttaaacagctaggcgcgtcacgaggctctcaaacattttaataatttttagacgccgtgacctgcggttcacctctctcccagcctcccccacgagcaggcagttactataatatgctcgcgcagttcgctgggtcatattgaattttgcgtaggtcattacttgggaaaaaaatgacagagcagaaatttgattcagctcatcctctccagctcgacttttcgccagagccttctcttctcttcatccaacccccacccgaaaaaagtcccattcggataggagtcagtcggccacgcccctgttttgattttccatcattcccatattttgtcagctcgggttccagagagagtgtggggtttcatgtgggatccttttgaggcctgagaatgaggctggcacggggaaaactgaaagcatggctttgggcacctgggccccagagagcaggcctgagcaagaggccccttccctgaaccttacccctaaatgcctgtatggccagggcccggatccccaccccattgcacactccatctgctttatttgctcccccaagtgtcagagatatcctcatttctacaaaagctttggaagctccagggcctagaaatgaccactccacctcttggggccaagattttggtccacacaacccagcaggtttggggaagatagaaccctgagagaggtgctgggctgggctggtcaaagccggcgacataactttcagagctttaactgtcctttaaatacaaaacaatagcttccccctccccccgaagaatcgttctcatcaatacagtaacacttttgcctacccccatcacccacacaaggaggttcaggagcagatcaagaaggcatttaaaatagtgagattttcttgggtttgtctctccaggattagaatctggtggattgcctacaacacacttctccctttctccagcttcctagggtcctgcagaggtgggtcaggtgactccctttcctcccaattcaagtctacagactgaaacagggctccagcctagttggtagggtggtatcctcctagtacggagaggtcaagaaagaactccccaaggcacccagcttggtccagaatggcagaggccacttcttccccatcctggtccttctagcccaggaccttgggctgctccagtctatacctaaatttgctaacgttctgtgctggaacagaaggagatggattcttcagttcaggctttgacatctgtctcttcaggactccaggaattccttcctggcctgacactgcagagaaactcacctaaggactaagcagaaatagggaccttcacccaattggtttagtcaaaaccctgggttaaatctatttgaaatttgatattaaacctttgtctcttctggccatgtttcaaaaggcatctttacagaaactctcaggttatctccatcctggaaggaaaaacgcccacagtgtacctcctatagtaaatgcttggaagagcagataatgacatctcataatacaacagtcatttaaagacccaaaatagacatatgccccagtgttataattactgagtctctctaggcatttgctcatgagctaagtttaatgtatggattcaaagttcatttcaggttgtctgtttcaactcccgtaaaaaagatctccgtgaggccatttggtatttttcctttgcatttctcctccctcatccaaataggaagagaaggagtcaagatgaacacacaaatggaggcttgggagagagtgagagaattaacaagctaatctttcagtaggcaagttcttaaactggagcaatttggagagaggaatgagagtttggaaaggctccagtgttggcccatgctcatggaccccaccttcctgacacagcctgggggttaagggttcttgaaaacaggcctgcctctcccaggggtggaggattgaaagagccagtagtttgacccctttagggcaagcagagtgagttgatgttggtgaaaatcaaaccttcacattggaagtattctttggccctgccagaagtcctacaaagacgtgggggtaatttaattgaatttctaaaatgtgtgtggctaggaaggttttaattaaatttaatatggtgactcaaagattatctttggaagagaaaattgctcagagggttcaccacacccttaagcgctgtcttttctacaactcaccaccaccaccaccagtctcgccctttttggagaagggatttttccttcctcagtttcccttccccagatatctgcctcttcgctgcccatttctgctcccccacttctgcaacccacaagtcttccttacctccagcatcccaggctccctcgtccgtcttcacacacatacagccccctcccccaccgccccaccccgcccccgccgctagtcgcctccgccgctcccactcacgcatggtgtaaacttttgaccctccaactttgcgacccctccggcaataacactggcctcaccacccagggtctcattctgctacgcgccggccgcagaaaccccagggcaaaacgctttccttacccctccccccttcgccaatgtccctactaccccagagccttagacctgggcaagaggagtcttttgactattaaataactccttggaaaaagacgcggaacccacctcccgcattttcagcggtctcttctattgggatgcctggaagggcttttgaccacccacccttcttcatttttgacacccgagtggggccgaggttgccggatgaggagacctatggcgagcagtagaatgggctgacctggagaagggcatttctggggtgaagggtggagagagcttggagcaggggctcctcgggagcagaaggggccgctgtgctcacagggctagagggagagttcagtgtcccaacgatgcgggggggcccggggccaccttgcgcggccgctcgctgacgcctcagaggccccagcctggctgtgaacttggtctaaggcggactctactggcagctccgggatgttacagcctctgcctctggtccagagcagcggcggtgcggacaacccgtgcgctttcggtttcccttccgcccaaatatcgcctcccagacccccacctctccctgggaaggatttcctttctccctccttgggatcccttgggattcagaaaacagaaaagaaaacgaattagagagatgcatgcacctaaggacaagcctgcaggagccccgaaatagggtatcctctatcatgcctccaaatccctcaagaggcgacgccccacacaggctggcactttccctccacttctcccctaggtgtgcctttccgtcctgactccccacctttccaactggcctgggtcatcttttggtaaggcaaaatggtctggggcctgcgaggtacctttcctccctagatgcattcagccctaccccaccgggctccgaggtcagggatccagggatcgttgcgaccaaaaccagccgctgtgctccgaagccgcaaggctcagcccggatccactaggggagaggcagtccagagggcggcctcgcagactgggaactgtttccggggaggagaagctagaggatactgcagagagtgcatttttctctccaagaggaactttagggggagaagagacaagagaggagacgcctaaatcactgagaaaaggaataagaagagagggaagagaaacgttaaaacttggggacaaggtgctttttgggatccgacaggttcccgaattgcccgaagtccaatactctccaggctcccaaatttcccctcttcctcttggagcctgcaatcagtaaattcgccaaaagaaagaacgaaagatccgcctaaacctgccggcgtgcccccacccccggtctacagaggcggaggtggctgcggcggtgtggccggcggcgcgtaatgtatgctgcagcggctcggagccccacgtaggccggcgctgctgcccccgtctgctgacctctgcatgatcccggactctatgaattattgatgagatatgagcgttgatttcccctttcaggatgcaaactccattatattgttaaaatggcgatttaatcgttgagaatagctttggtgtgggttttttcccccaactcatttgcgcctccttccttttcatttaactctcttaattaaatcctttaacagattttaatcactttttggagggagggataggagaaaggagaaggccataagaccatcactaccaacaacaacgggacgctaaagcaaaataaaacaaaccaaattcgaaaaccgtcataagcctctacctttgagaagtcgaaaggaaggtgaggggggaggttaacccctctagaaaggatgctcactaacctctgctggagacagagcattagagggctggggaaacccaccagagacaaggaagagtggggtggggcctgcaggaacgacctgaggggtatttaatcccccaccccgccaaccattaccaccatgagacttgtgtgtggagttgactgtagagactaagtcatttttgcccttgctgagaactccaggggcttcaagcctggggagggccacaggattcatgtgcagagggccctccaatctcaacctcagagtcccttagggagaaatatccattctgcttaaggggcccccgtttttcccttcccctccccaaacagctccgtttccaggcggtgttaattaatatggatgtgtaacagcgctgcagcaatcaataagtctcactgtgggcagatctcagcctcaaaatccgattactctgaaaaactccaaaaatggggagggttaccagtatcccctcccttaaaagaggggagctcattcttgctagccctgtcttccgagattgaccaggttggtcccccaagctgagaagtccatgctggggagactagccctgggaagggactgagtttgggggggttgtgctgagcttctgtcttctccattgctcagaatccttggcctgcaattcccagggataaaggaaccaggcaaggaaaggagctgcctcttagatcttcccattctgctcaccagccctcagagaataacttctcacagccagggaagggttaagtgtccctgccacagttatggagaggaagctgatgaaatatgggcacttggaactccaggcccagctggctttcctgtttacacttctttatacttcctcccacccattggcctcagagaaacaaaacaaaacaaataaccaaataaaacaaaacaaaaaaaatcaaaattgaattgtccaccgagtggtggccaggctggcctcagagggaaaagagaaactgcagccttaatctccagctgtcacctcctggggcctgccccaggttgaagatttggccagagggtaccggcttggcttatagctcaagaggttgaagcctggactggcagggagagaaagcaggtgggagaggagggagagcaaagccctggagagagtagagcagctctcttagagggagacagcctgggagggcaggaggagaggacagaggtctggggcagaggagagagttcttggcatcagaaatcccttcacacctctcattgcctcccgcagcttgtcctgactggggttcagacaggactggggttcagctcagggagcctgaagtggagaagaggaaagcccagcctagggcatcttctccaggacctgcttagagctggaggagacccttcaagagtttgttcactgaggtggaagtgggcaccccaatttgctctttgccatcctggaaaatccgaccagatatgcctagtagatgttagagcctacagaactgacatgagagggggcaaagaaacaatttttcaggagcaggccttactatctggggttctagcttccagaagggctttcagaaagggaagtatattagagtgaggccaggggcacaataggaatggggttcccctggagacccaggtcagactctcccttgcagagctctttgtctgcatgtctgtcaactccgttgccttgtagagtggaagactgtggaagctgtgcctccagcacttctttatattttcagtggtgctggggatcctttgggagatgacctgtgtctcctttctaagggatacaaatgccctcatcattcttgggatgatatgtcttcaaaccagggtgactctgctcttaaagcctgttaaggatttcctgtaagtcaggcttgggcagtggatagagagctcagggaatagaaagtggcttcaggagaaagaggacagggggagaactccaatgtcccttaatgagaaaaagggagtcttatgaccccatccttgtcccaaagatcagaagcccctcgaggtgccacatatccaatcccagaaactacctatggcagttggtgagctgaatcaagggatggcaggctggtgaaagtaggagtgacagggtagttagccccacgggtgttaaattggaggggggtcaatttggtggggaagaagcctctgacttttagaagggtgacttttccctagaaaataacagaacccctggggatcaaatcctgaagtctctctggtttatggttctacaaaacaaaggggactttgagggtgtgcccagaaaagaagagggaaaaagagaggaaaaaagagcacctttcctattttctcttccagctcctgaatctatttcctcccgacagttgagggatttgtattcttgagctgattttatttgaggagggcttgccagagttctacttaaacacctaacacctctaggcaagagaagaagctcttcccttcccccactcctggttcaggaattaggttttgaattgggggaattgccctctctgtctgctccctagtctgacttcaggatcctacttcgagccaaggagaaagattagcttgagaccaacaggctgaaggtggaggcaaaagcagcgctgtgctccccatcccagagaagcctgatgaagccaaagataaccggagggacctctttttatgggcttcaaagatcggaaagccagagatcaccccagggcaaggtagcccacagcagccgcctacccggtgctttttctcagctcagatgtatccagataaaagtgcccagcggtgcacccccacacacctccgacaaatgaatgtcataaagtttctttccggaggatggggggatagttgtctgaagatatccagcagtgaagtggcccccaccaatggccccttctttcagcaatatacacccctccttcctggtccctaaatttccgctggcactgagggagcatggatcccccacacaaacccttttccccacaaagtcagacactcctgttggtaaaaatcaggcacccccgaccgatgaggccttaagaaactgagagcactcatttcaggcacccagtcccttagaactgggtgcataaaacaggctaaatttcccctacatcaccccacagccccaggtggaaacaagttttcttcccccagtcccaggccccagaattgcaaggggtaaaagcgaaagctgaaagcgacttactgcgggaatgctggcctgggccgccgctgccttctgggctggtccggctgctccaggctgggagagtgctcacctacctctgcccccttccccaccacagcgagcagttaaagtgtcacttaacattctggagaatgtgaaatatactgcgcggtgtcaactccccaaaaccataaaactaactttatggacctcacgtgactttctcgagccagtgaggggtatctgtctgacttctcggcgatttttacgatctaacttcgagataaaacccctatccatttgacatctaaatgtcatagcgacttttgggatagtttgctatcgacaaagggagacaaagtcaaggggtgaagggaaaggagggccaagtagagcctccacgaccctcggcttcctcctcaccagctccccctccctccaagtccagtaagaagttgggccaagctggaagggattgaccgggtaagtgtccagacttgactcttgtgctcagggtggaggctgacttggatggaggtagactgggccctagccctgggccaggctgaaagggaaccaggggtctttctgaaaggaccctaactcctaatcaagagggaagatcagttgggcccttggagagaaggagcccttgataagggtagggaaggctgagggtgagagaaatcctttgaaatccagctgaattttttttttttttttttttgctttagttggtggcagagctgaattgggacttggagtaggagacagggggctgggcaggcctctaccactcccaaaaggccaggagcctcctgctgaggacttaggcccaaattactttcccagaagagttttccagaggcttccttggccagctagtggaagaccaggatgaagtctagctcagcctttcctctgccccagccccacatggggtttctgggccttggagtcccccaggcatgaaggtctgttccctggcccaagcactgttgaccaagccagtgacttacatggctgagaagagttgttggggagcagcctactttttcttccctgcaccccagatctattgagaatggtgcagggtgtgcccgggatgggagaggcagacccctcggagaaaagacaagtggaagggcaatggagtgggggaaacatttatttgacttccaggaaagctacaaacaaataccaaaagcgaatcactgagacaggccccgcaaagacagatttcacacgtagcacagcatccactcgctcactacaaatggtcttggaagcaagatgggtaagggagagatgggtctgacccagactatccccatatttacaagctttgggccctctagccagacccatggattcacagagaaatacacaagacattttgcactgaggatcatttttgtttccgtatactcccagaccaggccttgtggggcctacccaggcagcaggaacttaaatctcactatcttctttctctcttctcaataccatccctttggtcctccctagccccttcccaccctaggaccaagcccctaggagacttgggcctagggagtgaggagggaggaggaggagaatgaaaagggactccatctccgaagccagctcagcttgaccccactgcggcactaccccacctcaa

SEQ ID NO: 266 - DNA, 12255 bp, Homo sapiens
  source 1..12255: mol_type = genomic DNA
ctctatttggttctttctccctacatcatcattgtcgttattattttaactttggatgagaagatcaaagatagagttgcttttccctttcttgggctttgcaagtctccgaattggaggcggaaatgggggaagggttggaagttgtgtgtgaaaaacaattattgcaacgggttttccccaggagcttagtccggcctgcatcctggtggaactgctgttaccggtccacagcgcccaggccgagccggcagggctgggcgggaggcttgaaaaagaaggagaagcgttcacttctcctgggccacttggaagttcgaaatccccttccggacctccttggtggtccttagcccaggcgtggggagtgacagagcaggacagggaccccagaaaccgagcacagctggggctaagcggcctagttgccgaaaagactgcagcggccaccgcgtctgctgcttagtttgagtagtaacatgtgtctgagagtttgtaaagcgggatcccttcccctcctcctcggctattgcattcggaggccccactacaggtccctcactcgcagctaggcagtttgagaatttgcctggtggcagccgccttcccggaaaaggggttccaaggacccgcatgctttgctgagcacgctgggcggccagagaccgccgcagctggtctcctattaggaggggactattttctttaaaaataagaaaggaagcgagagggcggaggaataaaggaaaacagtgaccgcagcttgccttctgggtgccggtgcaagcagagagagaatgagccattctgggttgagaggatgacactaaaagccccatcacctggcctcctgccctggggtctccaaggagcaagggaaagttgtggccttcggcctgtgcctggctggtggctttacattcccctacttgaggctgatctcctacttgaggctgatctgctacttgaggtgggaaggggcacctggagccttcagctgcagggtgagagatacccagtggccccatttttcagtctccagagccacaggccaggagcggagggccaaggctggcgaaaaaacctggccatgtggacgggccaaagaccaggggtcgctgcgaaggtgaggacagaaaagcgctgcagaggcccccagactatggctccgtctccgccagagagctttaggggcctcagtggctcccttagtgctgtgtatacacgaggaaaggctagagaatgagagggacacagcacctctccatcccccaagtctgcacggggagaagcggctgtgagcctcagcaccagggaaacgcagcgctggggcctgggcaggactgatcgctccagcctttatctcagctgtaacttcccagtcgaacagggctcgcttcggcgggccagggctctcgcctttgctgaagaattctggctcaggaaagatggagaggctgggggttgaggagagaggaaaaaatggcaggggaggattggaggtgaccgagcgtcgagttttcacatctttattattgttgttgttgttgttattattattattattatcatcatcatcatcatcatcatcatcgaagtatttcacgtccagagctaagacaagactacaaacacaacacatagaaaattaataaaatagaactttgttttcttctgaggctcctcttcttacttctaggtagtatgtgctccttccagtggctttggggagggggtgggagagacgacaggtctgggatcagggagtcttcaaggcccccgctgaggggacagcgaatctaccattgaaccgtgcacgggggacatggacaaaatgagacgcgacagggacaagagcattttgctctgcttccaggaaacatcaagtgagtccgctcctcagttctcaccaggaagcctgatcaggctgaggcgagttcctcgggaaggaagggcgcgcgggatgctgggtgggctcgagtagtgaggcctcagagcacccgccgggagctgtgcgggcgggggcgtccaggagagcgctgggccccgcctgtctgcgccggagagcaggtctcctggctcccccacccgagagccttccttcccgggtctctctgacgccctcggctccccacaggcctttcccctcgcgtcctccctccctttccagcaccttcactcggcctgtttttcttcctcctcctcggcactgagctgagacgcgctgagcagtttgctctcctttttccacttcatgcgtcggttctggaaccatatcttgatctgcctctccgtcaggcacagggcgtgcgcgatctcgatgcgccgccgccgcgtcaggtagcgattgtagtgaaactccttctccagctccagcgtctggtaacgtgtgtatgtctggcggcctcgccggccgctgggcccaaaggaggaacctgttacgcagagtggagatgctgaggcctgcggtcaccgggcccaggaccccctcccctagtcgaccctcgaacacagactccagccagtaccgggatgccctctattctgccggctcccttcccccgtttcgcactcctccagcgccccctccagattccctcctagtctcctaggcctgtgccgtctgtctagactctagatgggggaggggaggagcagtttgaactcccacctgagcctggggggaggggctggtcaggtgtgtctcttcctagttgcatcttgtctttccctccctttccatccatcttgttcccaccccccgtcatccccccaacccaatgataaatccaggccgttaatccgtaatgacgtagatcgatccatagtccacattaacggctcctcactttcgagtccggctaatggacatcagttgggacttaaggccaacaaataatccaacctgagaccccgcgcctgtttctccctctctcgctccgcctgctccctctctcttccttccccttattcctcctccctcctctgactaccacccctttcctggtgcctcatcttgccccagctccccacccacagggaaacacagtcccagacagactcaactctttctcttcagcgtcaccccctacccccttgcatgacgcactccgtttttaatggagccgtctttggttggggaaccctaccagggctgggagaggggggttgggggctcaaagtaaagccaagccagtgactgcaggctcctgctcccttccctgtcctggaaccccggctctggccaggcgccccaggagagcacacttgctccccatggctcccagtgcggctgggactttgcaaactttgtaactcctgcctaataggggacacagcgagagacccccggccggcgcccaatcttcttctatctcctaactgagatgcccacccagcaccctgtgggagattggggcagggggcgctcactagttctgtgtcccggggtgggcgcccaggggagccggggcgacggcgacgggaagtctcactcactgttgcacgaattcatccgctgcatccacgggtagaccggagtggagcacttctgctcttctgtctcgccgaacacgctcttgtcctgcgcgcagtccgacttccgcggctcggggtggaacgggggctgctcgtcggcgccggagagtgcgcaggccgactctttctcgcggtagaaggccggcgccggcccgtagtcgcagggcgccgctcggccgtagccaccgcccgccggcgggtaataggaggaagtggcaaagcccttgtcctggcccggccctggcccgtagggcgcggggtaatgtctcagcgggtccgcatagcccgacgaatagagcggtagctggcccaggaaggactcctgcccgctggccagagtgacggggaaggtggagttcacgaaataggaactcattgggaggggaggcgcgcgcggccgctgctgctccgccgggtttatgatttgttgtgttttatagtccgagcgccgcgcctattagtagtatatccgagattgggttttagctgaggggggatggcgaggtgccagtgagggccagaaggaaatacaaccatctgatccaacactgaccaatggcagaggcaggaattgtcaaatagcacccaggaggagcgcagcccgcacgagggacccgcgcacaaacctatcaacctttttttttttcctccttctccttcgcctttctcctctctccccccaacaacacaacgcgtcctgttccacctacgtaggatctgtgaaacaggctcagtgcctttgagggaggagggaacgtttagattgagaccaccccactcccgggtgattaaataaatatgtctctcccccaccccacgcaggattggaaaaagttaattgtgttttcagaaaagttaacccctgcgttgcttcgaccccttctctccggggagggttgggtaaatgtctccgaatcgccttgagagagaactaaagaaggtttgtttctagggttttgtgtcggtagaaggtgagaagagttctccgctaagataagcaaagaagaaacaccctcctccccaggttttgaacatcgtttttcctgtttatcagatctgctctgtctcctccaagcctcggcttattgttcctgcttctccacaacccttctggtctgagggggcaggccagatcccactgcctagaagacccagaagaggaggagctggcaggagggactgagcccaagcttccccttctgactctgtggctagactaggagcttcttggaaggcggcgacgagggtggctgcccaaaacattctgcctggttctagtatgcagctgctcacccttggcaggggaaggggcactggggaaagggactagccctctcctcacttggtgatatggagtgaaggagtgaggggtatccctcagcctaggtggctttatttgtctgatccctatcctgcctgcaaccctcactccagtaccctctacaatcccaaaagacttaagaatagcctgggctataggattttcaggaatcagggatgtcccagtaaatctgggcacaaggaagaaatcattcttcttccagttgtgggctttgaaccctcctgatagttgaggcagtcagagaccactgggaagaaatgcatcctcactcctcttctaagtctctgtaggagctgccagttctttttaaaattaattctttcccaagacttggtttttgctttagtttgatagggagagaaggtcgtttgcgttctcttggggactcagcaggctgcttccagccatcagccagcatcccctctcccttctgtctgtatctcagcatcgctacaattccctcccacaccccgtgtttgtatcatcagctttgccgccttacaaatttaggtgtgtcagagaatgtatgtctctggctctttcatccaaggaaaataagcattgagcccaggctgggagacagggccacagtgcattcccaacattctaatatacatacacaggccaagtagtgaagggtgacaaccttcacacctggggacaagaaggggccagggcatggaacaaagtcagatgtcaggccaggctgaccctcctctgccttgtccttcctttgggctcctttttctggccaagttctgcccactgaagatggtacaagacactagggaaggtggcaggggactgagcttggatcaccaagggtgggaacttatttggttgcaacgtggtctccaaggctctctaaactcagggcaacttcttggctgtaccttaatggcaaaatagccatccctagatggcctccaattacttcctaacctgactctgtgggagtgtttgataagcatttaagaaaacaaatttaaaccccctgataatgaagaaggataaatattccatatctaggtatggctgggcttgcttctagagaggactaggggccatttgaacagggggagaaaagtgggagagagtacctgcatgcacctccctgcctactgctgaggctgagccctgggcctcagccttccctgcctcctccctgcccacaatgtctccatcctagcactaaatagtgtggttttctcagtgaagtctgaacaaaataagatctggtgaggaagggagcatttccctgtgtcagaagcagggaaataattgccttatctttagagtcacagcccccaaattaacctcacctctgcaggttgcttgtctggagatggagccactacaggcgggcctgggcgcctggagtcgggcatgaaagaaaatagcgcctcatcgctcttatctaagcccagaggtatttatgagcgtttattcgtctgatccgtttgtttgggaaaaagagcaggcgggcagggcaggccagagaccgactcctttctggagccagatccctacgaatctgtctgtggttcggtccaccgccctctgtctgtctccttgggggaatatgtaaatacacagcgggctcagccatccgccagtctggggtgtctctccctgcctcaatgaggaagtgtgtgttcagagagatggatagaagtgtgtaccaattcttgagtacataacagagggattgtacagataccccacaggcaggatttataattgtaattttctatgctgtgagtctgcagtcctgtgggcaagctaacacattccagctcccaggaaaatgtttcctaagttgtgttcagttcgggagtaaaattcttgataggtaacctcaggagggatatttgcgtgtgtgtgtgtgtgtgtgtgtgtgtgtggtgtggtgtggtgtgtgtgggagggtgctgagacattgtccaggcttccaatttcctctaagctataaagccctctccctcagctctttgaggtgatgagcaccttctcccaccacccccaactttggctggggtggggtgggatgaaaatatttcaactcaattctcgtcctggactctgtttctctgggtttggggaacataaataaatgttcccaggggtactgagtgatcactcccataggttgagggaggctgtttagatgagacactttgccctaaaatcggcccctccaaatcaaagtacaaagacttcattttcattatgcaaaggagcggcatcctctttgatctttaggggagtgagcagtagtgctgaacccactctcccggtttcctacccgcaggtccaggggacaacctgagggccctgaagtgtttcaataccatgtaccagcttgacttctctacatgtcctttggattgcccaaaagcaaaatctcagaggggccaaggaccttctagggctggctccctcagggcctcctatagagcagctccttgagtcgggccttatagccaccagaaagtcacctcgccgcaggaaagctataaagagctgctccagaggcgccgaaagagggtgagggctgcagccacagtgtttgtccccagcaccaccaggccccttaacctcgtcagctcctctagccctcggccagactctggcaacaccttggtttgcctggcaccgcaggcaatttcctggaaccccacccccacccaggaacggggaccacagcacctttaaaggaactgccagagcttcctcctacggcttgaaagcccaagctaatcagtaacccgtgagacaggggccaatattcaaacgctgcagcagaggcgcatagcctagccctggccaccccctcttgggaaggaggtcgagttaagccggtgtggagggtccaacaggaacggaaattacgacggtgtggttccttaaggatttggccccagtcccactaccaaatttttcccaaatcatatttaggtagacttcgcttgaaaagatcgagaatggaggaggggatcggcactcacttgcagacatcaacagtttccagaaaattcggttcaattccttcaccacggacccaccaaccaaggagctggcaaaacccactaaccaaccaggagaacacagacccggtttgtcttttgacaaccgagtggaactgacggggccggcgcctgccctgcgggtcccctcccttggctgagaagaaaaccaaataaaccttgaacagccttggcttcggatgtctcaagcggcctcatcctctcccgcgccttggtggggtgggggtggggatggcggtgggggtgtcggctctgatccctccaccctttgattcagggcccctgcccgctggaagcagaattagacctttttatatatgccctagaggaagccgcttcccttgccagccgccaggtttggggctaggatgggcggggacgggggcagtgggaaattggggatgatgggtggaggagagacttctgttctctaactcacaccggggaaccaagatctagctgagagcgtcggtgtgggcccgaaatcccccgaatcccgtggaccctgcgaggccggggctccaggcgtcgggcacctctggacagtgtcgcggggcttgcggcgccgaagccgcgtgtctccgaacggacggtagatggcagcagaccgcataatttgggtcacagcgaactgtctaagggaggatttataaccctccaagactacaggagaaaaagacctttagtatgggtgggtttgggaaatttttcccttgagaatagtccccgagtgccgtgggtgctggcggagaactctagctacgaagcccagcggtccctccaggcgcccaggccgggcctgaacctagggcatctacctggggccacagagccgcctcttccgcgccacaagtggcagcgtcgtccctctcctagcttaggactgagataataaatatatccccacttccaaaacgccccagaccctgtaactccggggcaaccagaggcccgaggctgaatgtcctgcatctggtcttaagaaagagaaaagcaatcacatgttcgtgcaaaccagactaaaaatcacaatttctcctgccctccacagccaacatcacttatctcttggctggaagcttccccagaagctcccttaccccatttttaagtccttgcctcaaggctggcacctacttccaccccacgagctactttaggaatctctgtcacctgcccaatgttctccgccctccccaccccctagaaggcctgactgagggataaaattggacacccgagggacgggactgtctgagctcagtgccagttagcttttcagtttagacgccgctaggtcccataattggattttctttttattttcttctttcatttctttctcttttatttttatttacaagcctaaaacaaaaaggcacttaacagcttcttcacaatcaccatgtctggacccaggaaagtttgaaatgttatcatatcagacacacacatggcaattttttcctccaccgaaatccacacatcccataccaatacaacgcaagtaatagaatcagtatcacgcagaaaccaacagctgtaacctaccgcattaaaaccacaaaactgtctccctgtagagcgaggctccctcctgcgggagtggcgagatacttgggcattctcgggcaggcttcctggtgaggggggagtctccctcatttttggtgtttccacccacagccctttaatttcaaaaatgtctccgaagggagatagtaaacatttctctgtaaattgtcttttctgtgtttctctagccgtttcctctccctcgccggcctcggcggagattccaggccctatagaaaccaggacgtcccttagcgccaccgcctcacatgccagtgctgccgggaacccagcgatatccgcaccaggcaagagaactgcgctggggcaatagccagaggccgagacaagggagggatggcaggagggggaggggcaagcccgcggaggccagaaccactggcttctttgggtgccactgaagcccagataccccccatcctctctttcgcaccccccttgcttgagtctctcctccaagcttaaaaaggcgacttagagctggtctcctggccctcttttgattcctcttcccgctttccctgccttggctccccctccaggaagcagccacccatatctccaccactgaatttcctgggaagcttctccctgcagcgcccagaggtggggttcagccccgtcttggaacgggggaggagggagaaaaacccaagccccacccccaccctacaaaagcgatgcaaaagaacaagaagaaaattgtagaatctcccttacctttgcagaccttgggattttttccccctccggatttaaaggaatgggtggggaggaaggaaggagtattcagtttcttcttcagcttccagataatattgtcccaacgtgagagccgttgcttccccttctctgacttgggagagagggtgtttcatttttctgacatttgcatagaaaatggagtaagttctggctttgaaaaatagtatcgggctgcagtcctgggcagattgtccatttaccctccatggtgactaaaatcccagatcagtgagcaaattaacttaggaatcaaaattatttttggttctctctttgtgtaattcccacccctccttctctccctctccctctcgcgctctctctcttttctcctcacccccctctctcgtcctctctctcttttgctctatcgagctgatactgaagtacaaaaatatcaagaggctggagccctgaaggacgacagtgctccgacctaggtgtggtgtccaaaagaatgctgcattataaccaccagggaaatgataaaaagttcatgttcacgatcgcccggccacatgaccggcgccggccaatcgctggattcaaccactcataaacttctatcacaaagttgtaaattttcataaaacaacaaggaatttattgcatttcttcatggctgctccaccagcaacccttttctcagtcgccatcttcttttcttctccttctctctttttggggaaaccccaatctgagaaggggtgagatttgggggggcaggaaatcagagtgcaaaagccataacggtacagctgggaagggggttcttttccgaacctccccactctccacaggagctctgctccctcttctagtaaaggtctaccccaaatcctctgcatagggactgttctgagacaattttggggtgaggcaggagcaggaaacggtgtctagagttgccacctgcataagggcaaaatgaaagcttcagtgtcccctctccccctctgaactggccccctcattcctagccctgtagacagcaggacccccacctgtgaggcttgcagcattgcaggcgtgggggccttagattccctagggcttagtttttgccccaggaggaaaagtggcctggatgggggccaaggcagatagtctgacaacctgattctcgcctccggaacccagaaactgggggagggtaaagccggatcctggcttctcccgcccaaatgcaggcaagtccaggtttcctatgacagctccatgcgctctccagggcgttacgtggtcattaatgggggaaactgcaggtttaaaagcattttacatacaaattcaaattcaacagattatcctaaaaccaaccctcttccctctttctatccaaagtctgtttaaatttaaacaatccagagtttataatcgaataaatgctaaaaatcaattcagcgggtctagccgcatagacaccatcctccaagttttggtcctgcaatcagcggatgtttggaagcaaaaaataaaataaaaattcagcccaggtttttcaggtcccctgaaataaccccgtatttcaagttgacctaccaatgcccgaattctggaaacgaaataacctcccccaacattttcccccctctctctctgtgcagcggagaaggttccaggctgccggcggcggcgcagagagcgggaagagaggctcggaggaagccccgggcgtggcgtggtcaggctccgagagcggccgggatgcggccacaccggcctggtaaactcgcacctcttaggatcttgctcccggactcattcccttccccaccccctattttaaagttttatttgggtcgtctgtatcaatttagaacgagataaattaagacaaagaaagtaaaataaatcgaaataaaatataggaatagctcttggcgaaaatgtttgccgtgcgagcaggaagccgtgagcgccctagttggaggctgctctgcgccgactaagaggcctctactccca

SEQ ID NO: 267 - DNA, 42172 bp, Homo sapiens
  source 1..42172: mol_type = genomic DNA
caattagggagaattcaggacaggttgtgccacagtctagaagtaaaatttccggtgagctgcccgcagcgccgtcccattctccccgctgcccattgtgaaaagctgggccagcgcttccttgtcgtaatttttaactacctgttataaaatttatgggtgggtttgtgaaaagaaacgaggtccctgcatccggcctagggaactgcttttcttactatggaggaagtctggggaaggcatgaggtatcccctcttggtcagggttgaggcacccaaccattgagattcccatgccagcttgatgcgggaccaagtggagagatgccggccttcaaatctcgagcccgtggggagagtgacctgcctgcaacccctcccccggcaaatagtctctatgggggaatttattctggactcaccttcaaaattaggggtctggaaaaacaggctgctcgaaattttagcacagaaggtggaattcagggcagtaaaaggttattttttcaggcctcggtagtacatcccagctgcccagacattgaatcaggaaatttttctgagaaaggcaggtgggtatgggcaatctgacacgatccaaaaggcttactgccttgcacccctccccgcaaaaaggaagtagagaccaagatcttgggctttaattttatttttaattgtaaaaagatttcaaataagccaccatttgaactgggaagggaaactagggatggtcttgggggaaaatgtcattctctctaagaaagggaccccggggatgtgggtcgttttgagggtcctagaagttgaccccaattctcacctctcctgctgcactgcaggattgcccagggtaggtctagtcccctaggttcttcagaccactccaggtcaggtttggttgggtggctgccagtggtcttccactactgttcctgtctagggtggagtaggagctttcaggggtacggcatagaggggatgttgttctcttactaaaaaaaaaaaaaaaaaaaaaaggtaggggtagggaggcaccctttcaatccctgcaattcaccagccatcactgcctcaaggccacaaatctttgcaaagctttgaattccgcctgatccaaccttaatgcccccatttattaaggacaatatttaaaactcggcaagccaggagaggcaaccgaccctcagtgcttgaagctttctttcgcctgggcgtccgccctcagctctttctgcgctcgcctgcagcagcctggcccgtggggagtgggcggtgggtgggggtaggggtggggtgggggtccggggatgctccctctatgagagaattgggtaaacatggcgaccgcggcgcccatttgcacacgctacacaaatgcatcgcattcccggttgtttgcagaaaatttacagctgagtaataaaagtttacgatcgactcacaagttggattggccacaagaagtcatgtggattccatccatgaacgtgaactttttattgtggtttgtccgttccgagcgctccgcagaacagtcctccctgtaagagcctaaccattgccagggaaacctgccctgggcgctcccttcattagcagtattttttttaaattaatctgattaataattatttttcccccatttaattttttttcctcccaggtggagttgccgaagctgggggcagctggggagggtggggatgggaggggagagacagaagttgagggcatctctctcttccttcccgaccctctggcccccaaggggcaggaggaatgcaggagcaggagttgagcttgggagctgcagatgcctccgcccctcctctctcccaggctcttcctcctgcccccttcttgcaactctccttaattttgtttggcttttggatgattataattatttttatttttgaatttatataaagtatatgtgtgtgtgtgtggagctgagacaggctcggcagcggcacagaatgagggaagacgagaaagagagtgggagagagagaggcagagagggagagagggagagtgacagcagcgctcggtaagtgtttccttattggttcaaatatgtaactaatggtccgtggcggtttcaagaataggacagcagcggcttctcttggttagggagaagagggggctggcgagagggtgggcgcgtagttaattatggggaggaaaattggcggggggagagaaacggggttaaactggaataccggtaactggtagtggggcgattgtgttgtcctgatgtcactgtgtgccaagttgggggtggggaggcaagggaacagcacctgtggggctcaagccggcggtctagggcgccagctctctgctgcccactgtgtcagtacctgcttattatagatcttcggtctcttggctaatggaactgggtcggagcggaactggaagctcaagctccaggcaggagagagaacttagaggctgtgcccattgccccctaagcaaagttagccccccaacccccaaacaaactttccagcttcccctccctgtctggcagccccctccctcccagagagcgcgactgctagagctcacacatgcgcagtgtgggcccagggccgggccgccgagcaggaagccggcgcagctaggcggccggcggggcctgttaattggcaattaggggggaggctggtggctggtgcgcgtcagccgagaggagagcgtctgcccaccccctgctcccgcccccactcgggcggatggaagggtgggaggtgccctgcgttgggtggagggtggaggttgtagggtgggggtgggggatgctgtactcaaaagccatcttgtgctcagagaaaagaggcctaccggctttcccttccggggtccggcgcccctcacccccagccgcggccatcccagccgggatgcccactggaccgggatgcccgctcgccacgcatggctgctctgggctaggacctgcctcgcctcggggggaggtggaaatggggaaggccctaggctgggcggggacaggcccagtcctcctggtagagtctcctaggtgctgtggaggcagtgaggattccgggggctgctggcttatggggtagaggcgtcagcctggggcggcgggagggtcctgggcactcgggatctctctaataattggtgctaatggcctgttgtatagtcttaacccgacgcatatggtttcataacacagtggcttaatttcttccaaatgtacgtggccctgaatgtgttgcagtttgatatatgaccccgccctgctccccggcctgggtccgaggctccgaggcggccccataagtgtgaatttctgtttataaacggcgacgcacacgcaaacgcctacacacccaggcagacacacccggaggcgtgggggaacatattccagacgaggtccgagagaacctgggggccagacttaccttaatctaagccaagacaccccctctacccccaccctctcccagaggcgcgactgggattctgcgccaagtcccagtgggggaggggatcgctccacgatttcctgtttaaaccctgacccgtcgcctgtgggggggcggggatgggggaagaaacctgtttttatcaaatttttaaaaatacagtttgcattcagatcaaaccgtttgggccagagctgacggtgaattttatctcccctccccccacaacccccttcccttccttttctgcccccgctaaattcccctttcgcagccatcataaaggcctctgaggtattctcccgcgggaagaaatggcattttctctccccctcccccacccccccacccccagtaggacttgtgtgtcggcagaggcgtctgacgaggggctaatttcgctttccttgtttacgatcgagaaaagcgcttggctctccccaaatgggcccagcccgccgcctgctcaggctgccgcgcgctctcccgccgctcaggcacggcccagtggctgatgccccgcggatccagcctgcggcaggccggaacccggagtctgtgggacctgaaaagggcaaagggagtgcggtgggacacaagaggggcccgagaggcccgaaaaagggagcctttctcctggagtaatgtgggaatcgccgaccggtgaggcctctatttctctctttcgcctgcattttgtccgcccccgcccctgtggatggccgctgatgggggggaacacaagtgtcctttgtccgtccccgaaagaaaaccttttccagagaaggccattcaggccagtggagattcacctagaatattagaagggccccctcccacccgaggggcgggcctgggcgaggctgaggtatttctcttaatcctagaacgacctcactgagtgtacccacagcgagatttggaggtgctagagttcgaggttggccgcttaacagcaccatcctgaggtgtctttatataatattttaattgattttctgtcccttcctggctacagccctgcagctcccccacccccatcctatgcccttcacccctagacccatccttacaagacagaggcaagcagagaaggcatagcagcagcgaccggcgctctgttttcattttccactctggccaggggataaactggaccccagtggactccaacaccaactctctgcttcccagttactttcgattttctttcccttctccttctttctctccctctctggcattcaaacagaagcacaagaggacccaccagtggcaactctaagcctccttgcaggccacattccctgctgacgtggtccttcctgcaggagagcccttctgtgattatctaataatagccagggtggctgagaatagaatctggctcaaggactctgcacacccggggcagagacactgaatctgtgggtcagggcctggcaacattccttggagcctccccctctgagcccactctttgggcacccttaggcttgcctgccccccttataaggggctttgtcagccctgccatccgctgtatttcatgtgctggttcctagctaaggagaattgggcagagcaaaccctttctcaccctggtctgacagttgtgatcccgacagaatgcgaccttgtttggagaaggcgaccttgttgggttggctgtgttctgaaaccaggcttgggagtgttatatatttattatatacaggcttaaatatacagactcaggcttatgcatgaatatatacagactcatatttccttggtggttaattgtatattaccatgcctatattcgctcaaacaccattttatgttcatgcaaaattttgttagtcctcactagatgagagtgggctcatggaggcaccgggtgcactgagcaggccctctgtgcatgctctgctggaaatatgtgctcactggaatcggagtatgcgggttccagtaaccaatggatgccataaaggctttctcagaccttattgcttttgttgcccaagcagctggactggggaaatactaaatcccttctgctttctctccacacctcctggcaaactctcccaacttagaaattattttacaagggagaccagttgtcttgaaattgagttctgcgggattcttttcacgggcatggtggggctgcaagcagttcggagtagtcagggccctggcgctggaagcctcactggagcgatgaagggatcagagtggttaataaggtggcctctggacagtgatctggggcagctgctggccagggtgcttggagaagcttgtggaaaaggcaagccaaaaggggtagggatgcagtgaatatctgtttctccccctgcttgccccagccggccgctcaccccgccccagcccgatttgcctgcatccgtggcggcagattgggagttctctaaggtcccccaaatacccagatctggttactggatgaactgcgttttaatcctcgtcgctatctgagccaggacaagacctggtcagggagacggctggtccgggcagcacgggagaggacgctggacccgctgcctgtggcctggagcactgagtatgggctaccaaggctgagaattgatgggcctcctttcccagcctttttcccttccagagacacaaaaagacagagcagaggggaaatatcaatgtcagtggaaaaccccataaaagaaagcagggaccagagcggggctggaggggttttccgctactctctctaggtgatcgggttcctcccaagactcttgtccagacaggctgcaccaagaggtgtgcagctttcttccaccttcctcccgcccttcaaggagggcagccttaggctttctgggccttggtcaccccaggcactggggtgacattactccaggattgtgcccctcgcccagcccacggcctctgccacggcgccgcagccgctcctgtttattgtgtctgtgagttgtttacttgttttgtctgctgccaccctgcgtcagaaacccgccaaaccagcgaactcgcccaggagaacaaagtgctgtgctatccccggactccctcccctttccagcaaccccctcctgccctcacaagctcctgcattctccctttcggaggggaggaagcagaaatagtcttaaaacagggcagctgtttatagggtcaggggaattatggggacaccataaacctctgggtgtccctgtggtggacagacttctgagcagcccttcccttgcctaggcttttcttccttcccctggtgaccacttggttaagggggccacactcattgagaaagttgagcccacccccatcaacccagtcccccactaccccactcctttctgcaggagtttccctgagacacaggttgttgggttttaaatcagggtaatgttggtggattcataaagctagatatagcatgtcattcttctcccacactccctctcctcagccccccaaaattgcagtgaatttaagcaaatcctacaaaattaaattgcccctttgctaaagatcctatatgtctccaatcctgccaggtgtagagtcagatagttggcttttggcctttaattttgctgctagctattaaatttaaaagagtatcattgaagtaagtaatattctcatttctgaaattaattttcccctcccagtctctctctctctctttttgccagcacagattaaatggttctttcagatctgcaaacaataaaggataaaattatttatagggaaatgaggatgctgttttattgttggcatattgttccagaacataacaacattttattttcaagcaggagaggttagaccagggggagaaagagggggaaaggaaaaaacatgaaaggagggcaggaacccacacacaaaactcctgccatgtataactggtaggacatttacaatttctatatgacaactcactgtgatgtcataataccgagttcttgaattttataattctcatgaacctctcaaatgggtccaagcagtgcttcatgtggaggggtatagaagaagccaggaggctggggatcctttgacccagtgcagagcagcacaccccctattgcggcttcttcctcatgtgacatcctcttgaggccctattctgggggctgaaaatattctggatattctgcattttaatttttctcctgggccaagcagggccacttgctttgcccccctcaagtgtccctaggcatctaagctctctccccattcccagatcacagagagctgtgtccccaggctctccccaagccccctcctcagctaatactcagctgcttggaatagaggtgggaggcttgggcaccagcccccaaaaagccagaaatgattttttccagatggagctggaagggggctcagggctgagcgtgatggggtagagatgtttgggacctattttacgttttaaccttaagtcagagaagtgaattgagaagccaaacaaatgccaatgtgagagtttgtatctgctgatggtagcagcaataagtgaagtgctggtaaggaaaggtcaggcagaaatctggaaagagagagggaggagaggaaatgtgacatgagttagcagagcccttccatatacctttcttctccgtttaattgtaataaagcaaaagcagctcgggtagcctctcaacctcttagctcaaaagaggaatcaccagcgcaggccttggaggtgtttgggggcagttctcagcagcttaacatgcccaatctgccctcttcctcctttccccctccctgctgatccccagctcccttcaactggtcagcccgggccctgtccccaaaatattagcacccccaaatgatatccatttctgtgttaggtgtgtcaaatttcacttctctccatgcctaaactttgaaaggaggagtgtacctttttggaatgcggtgtgtgtagcgggggcaggtatgtgctcagacagcttcccccatcatatctatgggaaactggaagccccttaggtgagccatgctttggtgttcccaaacagcattccctgcattcaggttctctggcagaccaggaggctctttgcgatctgatcctttgactaggagttccatggagatcaaaggagcttatttatacacaaaacaccaggcatttggagtagaatttattttttaatttctaaataaaaaagtctaatcatagaccaatcgggccaactgagcagtcgctccagaacagcaaagccttaaccaaatagtgtgattatgaggggagctgagcaattactgaaactcggctttctccgtaagagggattttagccctcgcccagtggcacaaaaggggccagcggggcaaccgttcttctcttgctcagaaaagtgagacttgggggtggtgggggcagggtcgggcagctgcggtcgcgtccaggcagctgagcacccaggccaggcgctgaggctgagcactgagtcctgaggctccagtgcttgggtccccgagcagcctcaggaggcaccgagctgtagttgcagcgcggcagtcaggaatggagtatgtgtatctgtgtgcgagggttggtgagttacaaacatccgcgcagagttaggggatctggggagagagaggagacagggagaacacaactaaggaggacctctggaaaatattgtccccaaataaaaattccagatctcatccctctcacttcaaatatccctccccaggaaattaatatatttcccagagctgagtggaaagcaaaggccagcaaggtgaggcctgcccacgaacttcttcaggctgggtccagtcccacccaccctttccccagttcagagctcacatgcccccagcctttccctggcctaaaggggagtaaggctggagtggtagcatttaacttgcctagggaaatccccaagtgcccaggctgcaatgccacccttatccttggggactccaggccagtgactgcaccccactcaggtccaaggcgcaggcagtaaatttctctcctataattagcgctatcaaaagcatgtgttttgcattggagaggactggagaagcaagtggcaatttttcccttgtattctttttctgtgttttttgaattctgtttttgaatccactaattaaagcttctctgaaagtgaaaatctgctcttgacaccaagccccttccgaatgcctgatttgggaggctaaggggccagagcagtagcaaggagacctgcaagcctgatggggttggggggtagtgttctctgatttctttaggctcgttttatagaaacaaagaacaagttctctcccctccttcccaagacttgtgcatatttacagagcacaactgcagttttaataaaacatctgttcttgcttctgctgatgagtttccataattgttttcagacaaatttaacaggaaaatataaatatatttagaaaaatctaagtcccagctttccccctatagacagccattcttttgccaaaaaaataaaattaacatgaaatgggaaaaagaaaatataatccaatgtagggaagatcgggctcatctgacctgctctccccccttggagcgaatcctttcagcaaatttcagctgcataattaaagatctaagagaaagaagagggcttcttctttcctcaggaatgaaaggtaattgggggggggggaggtgttgaaaattaattttgccaaaggtctttaagcagtggaggaatttatttgtatttctgtttccccttctctcccccttccagcatttctgcctttttcacccagcagctggtttctgttcattataaatcggcgagacctttcagtctctgccctctgtttagggacgtcataaaacacttaactttctggggctgaggctcacattctgcctctcaggtcgccaacctccctgagcccaccgactttaggccccaatagagaatctccccaactttggggcccctttcctctccagacatggttgaggaggggctcaaggaaacctaggcatccttgctgggggctgtagtccatgctgccccagaagccccttctttcttccaaggtccttccctcccccacccagacataaaagagatttttaaatacatagaaaatcaacactcattgaaagtgaaacctcattaagacatcctatcttccatcattcaatttgttgtacattgcaacaatttaatatcttgaaggaaatatcactgacatgatttatccctctagcaatctctctctgaaattggagggggggacagagttactctctcttccggcctcttctacttgttacaccactacccttagggcagaaaggaggctgggaactctgagagaggctacttgtgtccaggggtgcactgacttgttccctagctcagtccccagagtactcctgccttgttgtctctcccccacctcttgccctccagggggcctgaagcctcagccagctgttggaaacctctgctcaggcatgccatgaattcgaggacagctggattctagggcaaaaagcaactcacattggtgtctatgtttgtgtacctgccaagtcaccccaaaaatgagataactcatctaaaattttttttcttaatttaaaaatcctcctctaccctttccccttcatttccttggggagaagaaagtgtgatctagaaggaggaacctttataattataggagtctttccccttcccttccaaataccgacaaatttctgtcctttctggaggattggggctgtattttctaaaaccaacacaaattgtctggcaggaagactcttcaaccccctaacgaggttcatgtattaactaacatgttgtctccaccagctcctgcacactgtctgcttttgggttcgaaactttatttttcccccctagcgacactccagggaaaccttaacgttacagaagatgaataaacgagttttttctcagcatagtcccgtttatggctttattgctacccattgattactccgctttgttacacagaaggaaaagatcataaaatccggcgacatccgggttcttgttatagccagctttccccccccccaacccacccaaaaatggtggggggggggggatatgagctttctctgctccccgcacactccccaccacccttctttgtcaactcaaggcattttcagcctatatcacgatatcaaattaagtttggactaatcaggagaaaacccccatctgcacactttccgctgtttcagttcgcctactgcggctccctcacaagcctcggattcagctgccttttcgtaaccgtctcttccctttttttagccccaagatgggggaataaaatgggcgttgaggttgctgagaggcccatccccaccacgggtgactggcacttgggtgagagctccttagaacccctttctgaagtctccaagcctcatagctcaggtccaggggcgcctccactggcggtgccctgagtctggagggggcaggggggcttctgaccaaggcaggggcttgagcctgcaggaagctaactgtccatcagagccccaccagccttctctttctggctggatcctatgtgaattaccccacaggccctcactggctccaaataataaattctcaccaacataaacaggagttgatgtctctagaaagattctcagagttttcgttcttcctctctctctctttctctctgtctttccccctccggtgccacctccctacattttacttctttttctcctttttctattgcattttttatacattttcccttttaggcaaaaatgctggaagagttttcccaacagaggggtcctgagaaggaggcagaagggagccaggaggcaaaggagagcagatgcgtggcccatttgcccactccagctctgccactgtaccctgaagtcttgcccctttagacctagttgttccccacatccctactacattcaagactctcagccacactctacttactcaggggaacaggttttatgaaatttctttctacttttgatttttttttaattattggtgaaaaaaatactagtttagtgatgggactcactccatggagtgtcaaaacaggatttcctgcaggatttctagggacccccctcctgtgctgggagggagttcttcccttggagaaatcaggatgtaattttagaagggggcagatataaaacatgaaaccagattgaaaatacaggggtttctctagccctggctctggccacagcacagcaaagttagctggggctgagagatttcctggtagtacagctctccttccctgagtcccaaggccctgctcagggacatgcacccctccttcaccaccaaaccagttcccttacatatatatatatatatatatattttttaaaagaaatccaagtcttactttcaaagcacacacttagtctcaactagggaatcaacagaagcagaagcgatttttttcccccttcctgacatctggcttgcgattggctgggagggggtcagctgactttgtcattttgtctgtcctggattggagccgtccctataaccatctagttccgagtacaaactggagacagaaataaatattaaagaaatcatagaccgaccaggtaaaggcaaagggatgaattcctacttcactaacccttccttatcctgccacctcgccgggggccaggacgtcctccccaacgtcgccctcaattccaccgcctatgatccagtgaggcatttctcgacctatggagcggccgttgcccagaaccggatctactcgactcccttttattcgccacaggagaatgtcgtgttcagttccagccgggggccgtatgactatggatctaattccttttaccaggagaaagacatgctctcaaactgcagacaaaacaccttaggacataacacacagacctcaatcgctcaggattttagttctgagcagggcaggactgcgccccaggaccagaaagccagtatccagatttacccctggatgcagcgaatgaattcgcacagtggtgagttttacagctccgagatataaattaaataaactgaactggctttatgaccggcttccctagaagaacgggcggagagagttttttatggccccataaaaacaatcacgctcgtctcctcaccgagacagggccccctcttctgccccctcagctcgcctctcgctcgcttgcaggggcctggcccccttggcccctgacggattggagggccccaaggcgggctgagggggcaggaacagggcaggggatgaggggagggagcagaagataggggagccccccaaagtggagtcagtctgaggagaagggagggggagaggagaggcagataagtggggagaagtttccaaggaactaggatgcttggggagatgggggagcccagtccttgagaaagggggccctcatccccattatctgggatttttcaaaaatctgcttttagacttgcagctttctgtttgccttttgccccgcccccccgcccccccccccaccacacacctttctttgggacacacaggtcccaccttataggaggtctgaagttggggtcctcgctgtacccccagtgggggtggggcaaggcaaaagggagaaggctagagccctaaggaggctgtgagctgctggccaggttgggagggtcaggactttgctaggcgaaacagtctgcagaggacgctttgctgattgcttttagtgtgttttgtgcccggatctttaggggtcggctacggagcggaccggaggcgcggccgccagatctactcgcggtaccagaccctggaactggagaaggaatttcacttcaatcgctacctaacgcggcgccggcgcatcgagatcgccaacgcgctttgcctgaccgagcgacagatcaaaatctggttccagaaccgccggatgaagtggaaaaaagaatctaatctcacatccactctctcggggggcggcggaggggccaccgccgacagcctgggcggaaaagaggaaaagcgggaagagacagaagaggagaagcagaaagagtgaccaggactgtccctgccacccctctctccctttctccctcgctccccaccaactctcccctaatcacacactctgtatttatcactggcacaattgatgtgttttgattccctaaaacaaaattagggagtcaaacgtggacctgaaagtcagctctggaccccctccctcaccgcacaactctctttcaccacgcgcctcctcctcctcgctcccttgctagctcgttctcggcttgtctacaggcccttttccccgtccaggccttgggggctcggaccctgaactcagactctacagattgccctccaagtgaggacttggctcccccactccttcgacgcccccacccccgccccccgtgcagagagccggctcctgggcctgctggggcctctgctccagggcctcagggcccggcctggcagccggggagggccggaggcccaaggagggcgcgccttggccccacaccaacccccagggcctccccgcagtccctgcctagcccctctgccccagcaaatgcccagcccaggcaaattgtatttaaagaatcctgggggtcattatggcattttacaaactgtgaccgtttctgtgtgaagatttttagctgtatttgtggtctctgtatttatatttatgtttagcaccgtcagtgttcctatccaatttcaaaaaaggaaaaaaaagagggaaaattacaaaaagagagaaaaaaagtgaatgacgtttgtttagccagtaggagaaaataaataaataaataaatcccttcgtgttaccctcctgtataaatccaacctctgggtccgttctcgaatatttaataaaactgatattatttttaaaactttataccgggaattctgttaattcgctcgcccgccggcctcagggtgagagctggagcaggctccaagcgctcccgcgcctgccggccccctgcaagcccccagccctctgcactcgccttccccggagcccaggcgcccggccccggccttctgttcgttctcgcgatcgcactgaggggctgggaggcctctctgggctccctgcgcggagcaacacacacaccctgcgggaaaaagccgcgtaggattttgttgcggggggagctgggatcagtcggtttgggcaccaaccccacgcaggcctttcttcctgcctgtggcagccggtgtcctcggcgtccgaaccctgaggcgccccgaaagaccagtaaagaagcactatccaggcaccagggtctcctccacccactcccgggagttggaggcggggggcgccgtgagagcaagccccaggcccgcgccaagctggctgttgcgaaacgtagcggaggcggagagcggagggaaagagaagaccgcgggactggagccctgtcggcagggattgagcgattcaaggacatctcgagagagaaagcctggaaactgagctctcgcctgctctggtactcctgacgtggccgggacaaaattccttcttcattacagctccagccgggctggttccttacttttctctcctcaaacgggtgaagaggcgggtgaggagcgcagccggaccctaaccatttatcaaccctggccttctctctccaagcctggccagagaaacctgagtgggcctacagggagaggtgttgaggagggtctccggagggaaaaaatccgccagagttttccgggcccttcagattccctccagcgcccccaccctcgcctccagtgcctccaccagtgaggagggggccttctcctggcggggcggagatttcctgggaagaagcaggcagggaagtatgagacttggggctacgggggaagaggatggggccgaatggctgcagataccctgcgaaggctacccaggcgcctgccctgcccaccccccaggtccgccccattcctcttggtagctcagaaattgctctcttgtgaaccttatggattcaggtccctggaaagcctagcccagagaccttttccccaaagggcacataacgggccttttcctctgccatgctcacgtaatatttgtggaggcttcaatcttgcttctccatgtcctcaattaacatctattttctgtctaaaacctctggcataggtaccacataaggatcgcacacagggaaacagagcagtcctctagaccattgtctggctctgtccgtgtccacacacacacttgaaaattgccttgttgccactctggggaccctagcatggtgaggtctagccaactccacctggctcctcacctccagatccatcccaaacagcctgcaacaccctcagcttcatgacccccctatcttgttctgaccactcaggatccctcctcctgggcgtcctgtctacctcttcagaagctaattctactttctcttgctgataggcacctcttcagcagtagtggagccttagggcctgagaggcaagggacttctacctttggtttagggaacctaagttaaaccccattggttctccagcctgggcataggccaccttacctaacttaatcccctttcctcagccatttttgaagattggaagaccctggaggttgggagaacgggactttcattacaaaaagcactctgtgcgttataagtggggcctcgtcttttcccaattttaaatagaatttaaaaggctagctcaggggttgccccaacaaccagcttctccttcacagtgtaggaaatccagccaccggaaagcaagctggcgctccaggatgcaattcccccacataggcaccaggtgtcgctgtgggcttgttgtcccggctacccccaattccaagaacctttttttttttttccctcccccttccctctttctctctctcactccctctcccccttggttgggctttgccaacatatcgagatgcttttcgccggcttccatcactaacctcccggaggtcatcaagccaaatttatgagtggccgctcgagtcacgtgactctatttaaggctcccttatttgggaagagcgcataggataaagaaagagatatctccacctataaattgtccactttggagaacaaaaaacccctcaacttcaaagagtcacaaatcacccttaatcaaaaagggtgcagaaatttttttgggccctccccgccatgagctcctacgtagccaattcattctataagcagagccccaatatccctgcctataacatgcaaacttgtgggaactatggatcggcctcagaggtgcaggcatccaggtactgctacggcggattggacttaagcatcactttcccaccgcctgcgccttccaactctctccacggggtagacatggctgccaacccccgggctcaccccgaccgccccgcctgcagcgccgcggccgctccgggacacgctccgggcagagacgaagcggctcctctgaaccccgggatgtacagtcagaaggcggctcgcccggcgctggaggagcgagctaagagcagtggggagatcaaagaggagcaggcgcagacagggcagcccgccggactgagccagccaccggccccgccacagatttacccgtggatgaccaaactgcacatgagccacggtaaactttaggacttcattttgcgctctcgggtccgcctgggttttataggccatgcggggcaaataaagaaaaaaaacctgcggccataaattttacgatccaggcatcaatggctcgtaaaactgtccactaaaaggcttagaggctgtgtgcgcccaaatttacgacgacataattggatcataggaacaaaacgtgtataaaaggcaatattcaatttttgggggagagggagggagttaaaaaaatagagggatctgaagggtgaggagcgcggggctccagagcggggatccccccgcggctccctccctccctcccctgcggagccggctccgccggcgcttgcggctccggaggattccagcgactcgggaggggcgggaggggggtccccggtgctcggatctcgagggtgcttattgttcggtccgagcctgggtctccctcttccccccaaccccccctcagcccctccggctgcagagtgaaggctgcggtggaaagtttcctgcctgggcggaggcgcctctcccggggctgggctgggctggcccgcctgcggcccgcgtggcctgtcttgcggctctcgcctcctctccctccggccgcgggtgggggcctgggctggggtggggacgggggaacgctgcaagctattcaccccttcctggcttggggtggggtttatgttccagagacggacggcaagcggtcccgaaccagttacacgcgctaccagactctggaactcgagaaagaattccactttaaccgctacctcactcgccgcaggcgcatagagatcgccaacaacttgtgtctcaatgagagacagatcaagatctggttccagaaccgcaggatgaagtggaagaaagattccaaaatgaaaagcaaagaggctctttagaggcagcgggggaggcccgcagagcgcgcccctagccggttcctgtccctgcgcctttccttttcgcctttcctctctatatttcgggtcgggggcaggtgctggagcactgggctcccgggccccacagacaaaagcgcttttccttggcattccgcatccctaccgacccagggttcccgcggggctgtcggcgctgccccatctcccctcagctcggctcagctcggtacccggggcccagggcaagctccgcaggacttccccggagggctgcggcgtacaggctggcgcagaacgaaccttggcctgggccgtatctccggctcccagcctcagcgcggccctcccgagttaaggtgggcccggcccgcgccacaggaccctcgccggaccctctaacctcgccctctcctttgttcccggctggacgggttagacagccaaaggctggcgagagtctggccctagactcggggtgcttccttgtagcgactaaactagattttcacttatgaatgatttgcatatgaaaggagagcatcggcctagggcccccacagttgctctatgctttccaaaccttatctccacaacctcttccccccaaaacccgggaacctccccagcctgcgcctgctgcatgccctctcaggccggcagccccagcctgctagctagctcaactagtggggtttcctggcactggaccccagcaagtggtcctagaggccctttgctgtcccatagtccctgccacgaatttctgtgccctcctgacccattgctgttgtccaactatttattgactctgggtccttcctgaaactatattttgtcatatcaaataaagagagaacaggactaaagatgcagtggctcctgtctgtttggggcatgtattgggtaaaattgtctaaatgggctgtgagatgtagaaggagacccacaaactttaagccacccctttaaaaaattttctagcttctaggggcagtgagtagagggaggtgaaattgagctcctttcctgttccttggctgcaacaagagcctctgggggaagagaagggcacctaggcctcgagtactggcttttcccatgctgtggctgtccaaggccttcacgcctctgcactccaggaggcctctggactggcagcagcccccactgtgtgccaaagctgcggtgcaggaaccagtggctccaccgtgctcagccttaggaccttctgggcctctgaagatctttcctgggcctaggtggtccctgagaggccttgctggacatagagggagggctgagccctcactctagggacccatttggtctcataagggcctctagagggaggtggtattgcttggtaagggggtgttgggagagttggaggaggtgtgcctcagtatctaagatactggggaagagggagcagggaggacaatctgcagtgtgtatcagcctggcaggaaatgttcagactgtttccaccaccttctagggcctcgggctatgcaggacaattaactgggaaaggagctgcatagaccagtgctggagtcacgtctgtctgccatcatttatctcagtctctgggattttgtgtggaggggaggatgggttaaaagtgggggtgggaggaggcagataattcaggtagtgtctgaggatcaggtccttctccaggctcctgggatgggctgggggaggaagcactttacagtagaaacaaatgtgggaagggtccataaaactttactgcatttcctctcccacctcccacaacagggtgatttcctggagccaagcctaggccccccacactggtggggtgagggtctggagcttggctaagggattgcaccagcagccaagaagaaaggggagcagaggggctctggggaggggcaggggaatatttatgattattaatgctgatgctccttggatttattataaggactaacttcgctgcatcccactgcctaagctacccatcagtcattttttaaaagacccaagagcctttcctcaccccatgcttggcacataggcagtctcaacaaatgcttattgaacagtgcccacaactaccacccttccccttcgcactgcactcaggccaggttagggcgcctgttgtctctcctcaacttgcacacagcagttaacccagaccagtgctctctctctctctctctgaaataaaatgtgtaattttcttcagggagttattttaattttttctccatgctgagtaaaactattgagtgagcagtgaagcgtggagaagcactggcgtctccggtgggtaacagttaactaagaaagaggctgtggcacccgcacccacctgttccagcctcccaggctgcccaggccctgtgcttcctccccaggggacaggcgcaccaccccaggggaaaaccaagggctttgtcatagataggggcaatgttggttagagctgccaggcagggcacaccagccccaccgtgcactgactgcctcctcccggcagggtttgggcctctccttccctggaggagctgaaggtctgactcattttggcttgggtagacacagagtgcctgcctgccctcctccttcctgtcacaatctgcaggtctgcccaggcaccagccttggcttctgcagcatcgtcgggagtcagcggcggcaaccaagccagaggcctcgtacctacttccctacgctgagggtgcataaggcccagatccctgatttctccctgaacaggggcttctgctttggggcctggggtagtttccccaccagccagcctcctagaacatatttccaggtaacagggtctggcattgctctgggggagtttatggaggggtcttctgggttgcaagcagagactatggagcctgcctctccactttgccctggaacccaccccctctggcagcaagaaagaaggggaagaagcatgacttaccttcccgggggagtgggaagaggggggacacggcccactctgagcaattagaggaaagaggaggaaaaaataagaggacaaaaagatcaacacgacctcgaaggcgacaggtccttatggaaataagtaagtaaataaataaataaggatccaccctctcccccctctccaccctgcaagggggatgtgggggtggggcaaaggaacagcaccagggctttttagtgtaactgagcattagagaaataggcatgcttctatgtgaatttaggagtttgaaacttttggaggttatttatgtgaatagcctgaaggcaagcccgtgagtggctcttgggggaccacgtgatatcattaaaccaagttttatggtgtagggagagctgacaaacccacaatatatttacatcatatataatcttaactgtccagccacgcagctgctggtgaggtttaatgctaggacagagggcctggcagttagaggggattacggcgctggggacgatggtgagagaggttacatcttcgcaaatgaatcccaggcgaacgctgtgagttaattctctctttctctctctcagaccctttctcccatttacctaaccacccccctcacttgatagaaggcagctcccacttattagggggagggggaaaaggccttcccaggctggggtgggagaagagaagaagcagcagaaaaagctgctgggaagtaggaagatgggggagcttgtctaccctgagcagccctccccttcccactccttattctctctgactgcaagtcaactggggtagagaggccttggttgtttagagatttgccaggtcttcctgaccctttcagttgagaagaaagcaagcggcagcaacaagggtgtttggtgtctgtacgggtatgtaaactctagacacaagctcaaaatgcctctggggcccactgttccagggaggggtgagttcagcccttggccagtggcccaaggtgggaaactggggagaaaggcagggaaggagggttttgtggcttctacgcccacaggctactgctgcctgaactggcaaaagtatctcaaaggtggctgtttgaacccagaggtcccagagtgccccctccctccctcactaccaggcttggatgggcagctgtctcagcctccgtagtttggcatcttagtccgtctgaagccagtgtggtttcatgcttcctcctctccttctagctgcttgggtcttcctggcattcccagcccttgcctgagataaaactaggctctaagagccctagaggttcctgctgtgagtggagtgtaattgtgtgttgaatgggtgagggagcagaggcaatgtctttgctaggctgggaaagtaagtcccccaaccttaaggacagagtagcccctcggggatggagctagcagggcccaatatgagcactgcaccctggggtcaatcctcaggctagggcgcccttcaggtttctaggaaggagcagcagaagcgttgggcatgagaggcacatgtcttccacacctgcaattgctatccctccctgtgcgtcaccgggagctaagccaggaaagtgacaacatgtgaattcaggctcctgtactggccagccatgaatagccagggctttggaagcagggctgaatgccagcggacccataggtgcaactcctccaggctgggagaaaggggtggggagcagagggagtgagccagatatgcaccttccagaaggggagcatgcctggggagcagcggtgtctgggcatctgctttgtggagaggtgctgttgggggatgaggagggaatgctgttagcctcgcccccgctgctcaagggactggggaagaagcgagaagcaggcagactctgggagaaggaagggggcacagaggcccaaataaatggggagtcttagctgagccccattcttcagtctaggggtctctcacttgcatgaggagctcgggaacccgacatggaggattcccttgacgccatccctcagggcctcagtctcggccaagattcagcctcccccaccctcctccctgatacctttattttcctaggatcccagggaattctctccagcaacgcattggaaaaaactaattatcagtttctcccttcctcattacccgtccttcttggctctctccttccctctagtctgtgattttgagagtttctggaaactttcctatccaagcagcggagacatgggagtttctcttggtctgtaacttgactcttccccaccctccagcctccccagggctctagggagcgagtgcagtggtctttaaccgggaatttagccagggccgaagtcccacacccaggcaagactccaccctgacacccgccctgactctcggccaaatctcagtcccattcccttcctctctgtgtagacgggcattcgagggtgtttaaagatttacatagcgtcccttgagccctttgatgacttcttcacccccttttctgttctttaggctcaaaagttccatttaaataccacccctcttcctgtgataattgattctccttcccctcaaatagtttgcctcagttttttactgttttctaaaaagtttctagttccacctggaaacagggcaaacgcaaaggaggcctgaaattcttggttttcccacccactaccccaaaccctaatttggagtgtctctggagcggagggtgggcaggcaatcaggtgccaagctttccagccaacccgggaagcttttaattttgttcctaggactttaacccaaggagaggtcaagcaaccaatcagaaatgcactaagcagggtcacatggtccccaccaaccaatcagcaaaaactacttgggtctctgtctcgctcttcccatccggccctgttccttcctccctccctcccttcccaccacagccttagctcctgggtttatcctatctcagatttggaaggctggagtgatacccagcatattctagcctcctctgtcagtccctgaaccaactctgaggagtctttggcttgtctcctcagttgcttacaaagttgtatctgggagtcaatctcaaatgcacaaggatgtgaagttgtgggggcatcctctggattattcccacgttcgccagcgtgattctacccaattttctgggtgttgtagttgtagactctaaattagactatagagcaaatacagatatgaactccagccctgaattcaaattctggctgtgattattccccatacacttacaagtattcattctcttctgattttcatgagggcaggtggggtgagaggagagcccttttgatttctctttctggaaatgctccaatagccattagctttatcagactgcctcaggcatggttagggaagggagcaaaagtggagattttttgaaagttctgattggtacctttcgtttgtcgaataactttgagctagttaagggttctggaaaggaatgagcacagagaattccgactttcctcactctccacattaaatagttgatggatttgtttaaaccccttcccttccattcttttaacaggatataataatagtaataataataatagactaggtgatgatcctatgtcctggccaatagccatcaaaaggtacagccactgaaggtgtggatttcagtgtttgagtttacatggattaggccaagaacaagcaataggcgagaaactattgctgagtaagagcatctgatggcacagggagtgcacagctatgacagaaatgcttgtgtttcctgaacacttgggctgggccctgagccagtccactgctgggtccagacccaggtattctcccccagccacttctctagagctttgtttcagagtgaattttctggttgggttctcctccccttctcttcctgatctcttgccctctttgagctaaggggcaggagttctgatggactgtggcacctggacctctaagcacccccctgggggcattaagagtacaagaatgggaaggatagtccggactgagctgggctttgtcaacaatcccctcattgtttgtcttctggatggagctggtttggggacaatgccacaggccaggtgggaaggataaggatgagaagccagaaaaagagcagctcttctcagaaatcattgagccctcacttttcaagttaccttcaaccacactgctccatctgcttattttgagactaagtttcactcttgtcgccccggctggagtgcaatggcacaatctcggctcatcgcaaactctgtctcctgggttcaagtgattctcctgcctcaacctcccaagtggctgggattacaggtgcccaccaccacacccagttaatttttgtatttttggcagagatgagatttaatcatgttgcccaggctgacctcaggtaatccacacgcctcatcctcccaaagtgctgagattacaggtgtgaaccaccgcgcccagccttttcttttcttttcttttttttttttttttttgagatggagtttcactcttgttgcccaggctatagtgcaatggcaggatctcagctcaccgcaaactctgcctcctgggttcaagcgattctcctgcctcagcctcctgagtagctgggattagaggcatgcaccaccacgcctggctaattttgtatttttaatagagacagggtttctccgtgttggtcaggctggtctcaaactcctgacatcagatgatccgcctgcctttgcctcccaaggtgctgggattacaggcatgagccaccgtggccagccccatttgcctcttttatgagttagaattaaaggacacacttattcttccccagtgaatggtgtggcagattgttggagaccaactctcaccctcaatgtggacttctcacactggggtaccagatctcatgaagagttaggaaacaaagacagggggagattggttctatccacacaggcactgggaaaagagattttgtgagtgcctcgacccctccttgtgagtgcctcaaaaaggtaaactttctctttttgactgtcgttctctgtaactgctttggactgagtttttgagagggggaatgctgaaacatcattgttctaggatttaattaggtcctttttgctgagaagacaagcaccaccaccctgagcctcttctttagtgggactagggcccctgaagccctttgaggtgaaggagaaagaaaatctgaaatcagggtgccaaactagggttttggggtgaatgattcaatttaaggagaagacgatgctgtttgagagccaagaaagtcacatcctttcctacccctcccaacttttattggctccttgtgacccacattggtgtgtctgtactgatactatctctgctagcagctttgatggggctccaggagcccaaggaattgccagacaaggtctgggttgaggaacttcggtgatacaaatctctttatttttgaggcctacacaacccttgtaatcatctccctctcccaatcctaaggttcactgagaggcaaaaggggaacagagatacctcagaggaagcggtatgggtgtgcaatgtgggacttgggaaaattggactcggttatgcaggaccttgttcagcctctaaggaccacattttagcagctatgagaagaggttgaacacttgggctgggccctgagccggtccactgctccaggcatgctggggagcaagtgcagggagaaggctgcttctctgcatctgtacacatgtacagagaaagttctacagtgatctgcaaccccatatgggctgggtgaaatgtgtagcctggtcacctaggatcctttcagttctgcaccacaggtctcagagaggcagttcaggcttggttctgccctctaaagattctcatttaccccagcccctggccctgaacaccagaatacctgaacacacagaaacacatatatgtgcccaaggatggtatggtagaggtcagaagcctgggctggacacagtaaccagcatggaaccaacttcccactcctccctcccactccattcttcccgtcagcccagcttggaaaccatttgtcctccccaccccacccccacccctcaagccctgcgcagctgttgagtttccttccttctgcctttctggaaaactcaaacgctagagctgactccagggatggtggcagccaggctttctgtgatcttcagtgttgtgttggcccagattgagttgtcaggagttgaagagacatggagggtccaaggaggccagaatcttatctgatctaatccccctctccttctgttccaagctcaaactccaaactcctcagggctcccttgctcagacattagagataaatcttgtctagtaaatacttcttttaaaagtcaactttctggctggaaaacacaggctgtgtgtgtgtgtgtgtgtgtgtgtgtgtgtgtgtgtgtgtgtgtgtgtttagggagtagtaagggtcaggtctttcattttatgttgtgtctctccccatcccctgggtggaggatgggggcacaggctgaggttttattgagggtgcttttcctgttgggagtaaagacagggtcataaacgcctagagtagggtgttttgatctggtgacttctcaggaagtagcatctgaggttttgctttgtaaatcactctcccccaaagctggcttggcagattggattgcacttccccaagcccacctgaggcccctcctttcctcccttccccagtaaactaaaggagaaatataacagagcatctggagtcttcaaaatcctctgactccaatttcttttttaaaaggctaattggtgatttttttttccctcaaagttttcccctaaaaaataatgcaacgtttcatttccttttgcccatgcagtccctggtcccccaacccctcagtcacaaaggaactaacattgacagtaaatagcctcagagcctggctgtagatatcaggactcttctgttctggggctgatctctccctgtcactctttccccaagccccaaaccccctttgacaaggtagaacttcagatgtataagacagagttcataggagctaggaataagaggagatggcagcggggcataggggaaccccatcgtgtaccgcatgaatggaggaaactctgcagtctgtcactgggtttttttgtaattaagatgggtgcaggggtgtgtgagtgtgtgtgtttgtgtgtgtgtgtgtgtgtaagcccccagccttctcacatctctatgtaccaaacaaacaatatattttacctaaataactccatttcctaatgataatgagtcttcccctcctaaggatcccccaccccctggctggcaagtccctcccttgtgcctggggctacagagctgaaggaaaacaaagttaagagccctctaattcagccttagttcaagccagatcaggtcaggaagctttcaggcccaggcatcagggcttatattcattgccagcaaaatgcccctatatgctggaaatatgtcatagattatatgagttccgggccctcttagcacttgcgaagtctctagtccaccctcatttctttctcagagaagcctgggctgggataccccaaacccacaagcactagagattcctcttcattcctaggactccatgcaaataatcttcacagagagctgagcgctcccatagttatatatgtgaaaacgtatttatagatcgttctatgtctatatcaggatgtatgttttatattcctttttgttccacatttaaatgcagatttatagatccatagtgaacataacagtcctcggtcaaattcctgtgtgcactttaccaatctttctatagtggttggatgtatatgctaggatgtattggtacagctctcttgaaacacctaagtgaatatttggaaatttttttctttgttggaaagaactatgtgtgtgttcaatgtctattttgaaaattttatctagatttatgcaaggatcctaacccataaaatagctacatattgaagctacatatttagagatctttacagtctttgcatttttgctgaaaaacttacatgtttgaacatatgtttagagatggtttcataatgcatgcatctgtgtataggggcatagatctcccttctagaaggacttaaacttactgcatctctctgtctccctctctatctctgtgtctatgatataaaaagatattaggtgagtgggggtagggaacaaatatattttggatgtttggcttattaaagcaagtaattctgtctctatttctaaggccatctccaaaatctagtcccactaagttatctgtccctcgaaaacctactctaggggtcatagactgcctccaggctgcctctgtgacctgagatccaagccgaagctccctacctctcaaggtagccactaaaaagaagggggagagaagaaaggggagagtcctccagcccagttcctgttggatccccagggcaagaggctgacaggggcttgtatatctccctacaccccccactgggcctttgaaatgtgggggaaaaagggatcaagtccccaactgtttttatagggtgcccaaatgatgccagggttactgcacaacccataggttcctcctccccagttgttctcggtgcccagggcccaattaagcggccgccttgcgcccagcagccccgctcttatcggctgggattgatgcctccgcgtctcctgtatatcatttccaagattttttctgtccaactcctcggctcctttggcttccgcggctttgactaatgattgctacagatgccaacgtctccagaatcctaatagccaggcaggcggactcttatttacccggcaacattgctgtgggggagggggcctgggggacaagtattggggtgtcgtaggtcaggggacagggagaaggttgtggccaactcaagtgtcactgaacttcttcccagtcagaaagacattcccaatccccttctctccttgagggaaatatatatatatatatacacagttaatggtaactcattgctgcctcgttagaaaagatcaaagaatgaacacaacgtggtagaataagcagagcaatgtttatttgttgtaaataaatgagagaataagtggaaaaccagcagtttggggaggaaaaagagaaagggaaagaagtcagccacagtgggagaaggggctccttttcttcatttcttgtcttcccctttctctccccaccctaagtctacccttctcatcaatttctcccctctttcccttccttcgcctcaccttcaatcccttgggtggaggggctgaacagcgtgttcccgggcggaggtgcgcgcagccaccccaggctgctgccaggtgcccgctggggctgccagggcgaggaggcctctgggctgtggagcgaaagtcagatccaccgcctactgcggggtaggggccgcagtggggaccgccagccctgtggtccctctcgcgctgactggcgtaaagttgtggccgaattcgcatctcttctggtgcttctcgcccgccagcgcagggcccaggtgtttgaggcgaaggggctctagctccccgcaagcctggagccaggcgtcgcgcttcctccgggcttaatccagacctttcaacacacacctcattcgggggaggagaaaagcacaggaccgcggagagcccagctttgaggccaggcctgaagggataacccacacagggaacgttttcctatcagagaataatggagcacaaaataattcagaaagcgaatgggcaggaccacagcctgagagtcccgcgccgcggggccgctgcagagccggtctcccgagcaccgcggcaggaccatttcgttggaatgtagggcgaggccgaagcccgccccggacccaggccgcgaggtgcgcgccggccgccgaggggccgcctgtaaattacagcccgccgggaggactcggaaatacacaaaaggagccgaaagatttaaacagtcggaggcagaggcgtcccgaggcggccaaagcggaaatcaatcacgtaattaaaacagggaggggacgaagcccaaggctgggggtcccgggttcggaggaggcggccaaggtgcaggccgaggctggcgagcggcttagggacgtggctcgcccgccaggaccagagcgcgcggaggggcttcggggaagtttataacacatcgctattgattcccgcttggctaggaagagcagactctggtgccctctcccaggccagaccctgaagcctccgatggccccttctccgactttcccgtttttgtggggttgagacgcgcagttgcagttgaaggccgctccccagatcccactggtgccacgattttgccaaggcaagtttgcgaacccaaatggcatcaagatgctgcctttgggtttgaggggatggagggaggtgacaccccagtttcaggcactaagaaatctctctcggccttgattcctccaacccaggattcaaagcatgcccggaaagactctgatctatgggccgaggcttggaaggggtgtgcgaggcagacggggttattaaagggagagcttggggctgagcaaactggacccctttgggctggaaaggagaaagaacagctcctggaagagaaaaaaaggcacaccgggagctgtgttttgtgaggggaagatcttattattgaggttaatcatggtaatgatctggtatggctgggtcagcccaggagaccgcgctctccaaagttctttctcacagaggtttctctgggggagtcaagggttccccaacttcactatggttggggaaaataaaataaagacctccaatcctctcctctgccttttcctctccctcccttaaaaactccagaaaaagggaaaccttataaaatctccatcaccccacttatttttccttggctctctccagtttactaaaatgcacggtctttgggaattgagtttttctggagcacccttcttgtgaagcaacagaggtgacccgaccaagtcctcatgaattctgatgctgaccctggagaggacccaggattcccttgcctactgtagaattctctctctatccttagtttttcccagtctctgccttctttggtcttgggtgcataatctcatgggtctctggcagttcagaggccaagaacagattaaggcactttgagataccctcataaactcttaaaagtgtttccagcttcctgtcatctctttaatactgggagtaccaggccagggacccctccataaactaacctaaggccagcctgatttctagatcttttcaagccacatttaggttccttgaaaaataaaagtccccctccccagcaagaaattcaggtcaccaacctgccgcacagcaaggttcctgcatccacacatcagaattttcaacaacaacaattttcataataagaagtaaagcttgcatcaaagttagcaagggacaccccaaaccaaattttaaaaaggatatcatccagcagtcttgaagaggggtgggggtcaatgaggctgggatgagggaggaaggtggtggggaacccaacctctaactaacaatttctccagcataaaaatgaaacatcagattcgttagcccagggccttcatttttccccttccacattataactagttattgaactcgctggaagatctaaaggccatttgcgaagagacaaatttcaatggagtttccccatcaataaccccatggcagtgaactattggaacaagtcaaacacccgaggtgaaatgcaggtcactctgtctaaccaatattaaaatgcggccactttttaaaaagccactttaaacgagatttgaggaaaattgaattccaaggaaggcaaggcaaggcaagagaaatccatgagaggaccttgcctaaggtctccaaacaaacaagagaaattcatctttaatattttaaaggggggcaaattaacattccatgattgctttttttttttgagactataagcgattccaggagaagaaaaaaggttgagtattttctggtgacacatccaggttattaaaatcattttagaccaattcattacttttactgacaagagatttaagaaaaaatcaattaagatttgcatattcttttgcatacattagccctggctgccggcattagaaagggacaaacacatacacacacacacacacacacacacacacacacacacacacacacacacacacgaaaaaaatgggctatgagccttgatttagttttgggttttcaagttgcccaaaggaaaaaaaaatcaaagtgaaatgaattgcctgattgcataccatctaaaattcaatttatatgagtgaaaggaaacagaaatgttgcaatttttaatccctaaaacaacaacaacaacaacattcacacacataaaccctgcatttcaaagagtagggaaaggaatgaccctcattttccttccctttgccctccaaatcctgaattggttcacccatttatttttctcccttggaaaaatcagagaggggtacgattttaatgcagcagagaatctatggagccgctgagctctctcagccggcagcttgttactggggaggggaggaatatgggttatccaacggtcagtatggtaatccaggcacaataaggcctcacacacaatggacacatatttttcttcagcgatgtcagaagggaagcgctttgtactgaaacgtgtttccgaaagagaaaccaaatcgagatttagaaaggagatggggtggaggggcaattgcagagagcatttggatgctggcaaaaggtagtcagaaaaaataaaaataaataaaactggggcaaagtgaggttgaggacagggcagaggtgcagcccctgggccagcaaggcgggaggcaggagggtgaaacacaaaagaagacaggaccagatacaaggattcatcacagatgagagctgctttagtacccccaccccctcccaattaagccattgctaagtgcaaaagcccttccaacggattttatttctgtgcttgtaataatatccaggtgaaaatgtttgtgtgtatgtgtgtggtattttacccatgtgacaggcgacttccttgctattaagctataggagcccaaagagagttgctgttgttgttttgtaaatgatgtagatgagtgtgggcacatttgggggaatcttggagatttcactttctggatgtgcatgttgaattagctgcacgaacctggaatgaaaactctacatatttatagctgcataaagaggcatttaatatattaataaatattaatagtgtgcacgcatatatgttaaccataataaccaaagacagacttgacattcagttgggggcatctgaaccctctgtgtctactacttatactggcccaaagtcagtctccttgacccccctgcagaagctcagaaacctggcgggggtgggatgtgacaggcaacatattggggaggactccttaacaagtacaggagggtgaagattgaagaaaagagggttagcgtcagggcacggatggtaaaaggtgagtgtgagggctgagaggatgagagtcaggctcacagctcacctttccaggtgaggcagccgcatccaggtacaggcctagaagggagactgggagtggggccgggaaggtttcctccctcttcatcaaccctctccacatggcaccaaagtttgctgagctttggacttcccggtggagccatctgggactacagttcagacttaggtactaggattcagcactggtttccctttgccctcttccagcaatttataatgaacccacccccaccaccaatgattaagacaaccccacacaacccaaaccactattaaccaagcagtagccttcctccgccccctcactcacagtctcaacttcctctccaaccaaaccagcctgtcctcacatgcagagagttccggacaagagtgggcaagggttctcagccaactctgagaatttgggaatctccattagaggtgttcagcctctggggaactcctgttccttcacctggcctggttacagtggggatgggcactgtcctcttggagagagagtattcagggaccaccaagcaccagctccttgggagctaagccctggccctgctgagcctggggtggggctgggggcctaagcattggaggagggaaggcaacgagggcccaggcgggaatccgcaccctttgggcacggctgtgggtccagcttccctctcattccagccctttggggaagccctaatttggaagtggggaccctctccaacatcccaaaggtgatgagaaaaggattggaatctcttgccttcagtctccctctcacaagggctttattttttttttccctttcccctcctcattcccttaattgcagatgttctaattaaaccctcaaatagttgttatgccgttttaaaaggtacttattcaagtgtcaaccaggctgggctgggaggaggtagcgtagggcggcgaattaaaggtagattgactaatcacggcggcgatcataataataaaatcagagggaaaaaaaatcacattacgacttttcgtggaaaggagggagcaggcagccagcggccgccagccctgcgccgccgccgacacaaagagtgcgggcgattccgcgagactgatttatgacgttttacagccctataaaagctgtagcgacgaggcaagcgctcctaccaccgctggcagatttagtctaataaataaaacataaacagttaactttatgtgtcacttttattgttatcaagtaaaatatagctgagccctggcaagctatgattttaaactataattgttatcaagtacaacaaggggacccggctccctccctgggctctcccctccgctaccccccgcaactctgagttatgggcgatcagttaattggaatcggtggcatgacaggaccacccctagctggggggggggggtggtggttaggaaagcagcttttcctggccccctccctcctctacggccctgtcacccccctccatcagagtattactgtgagtgggtggcagagagagagcagggggtgtgaatgggctggagaccccaaaggctggccgtgcctccccaacttggtgagcttagccttccgtttttggaaagcagcctggagctggcctttaggaattcgtgtttacatgtaaacacacgtgttacatggatacagctcctagccagaagcaagcaggctctacccacacaggcctccctcttagctaggtctgccctctgtggggacagagaaagaactctcaggatcttggctgggcaccatcacagggcactgactcctggcagaaagctctcctccttgccccagctccttggagataattgtcagaaaatagcaggccgggctgaatggggagtggaaacagaagccagcagtagaagagatcctctgctctggggctggggcagggagggtcagtgggtagcaggggaaggcgagacttctgaactctgcttttgccaaccacttcctgtctctcttcagcgggggctcaacccccagacctccagaaatgacgtcagaatcatttgcatcccgctgcctctacctgcctggtccagctgggaccctgcctcgccggccgcatggccagagggttgggtgagtgtgtatggggaagaggggctggactctggtatccttggatggggggcactccaggctctccagcctcctcggctcagcctgggcccctccccatccaacatccactccagtcctcattcaacttcctcttcctgcgaaagaggggcgctgccccgtgacctacacagactgagacacgatcgccatgaatggagacctctggaaaagctcaggagccgaggcccacggggcccagcagaggcctgaggggagaccctgggcgggggctgaatcactgcctcccgacagtcccccaatgcccgggctttggaggggagccgggagcttcccatctccttttgcaggggagggttgtcagtctggcgggatgtgcactgggggcactccaacctctgctagctaaccccacatcaccacccacccccgcctcccagcaccaccaccaccacacacacaaaaaaattggatacattttgaataaagcgattcggttccttatccggggactgggttgctccgtgtgattggccggaggagtcacatggtgaaagtaactttacagggtcgctagctagtaggagggctttatggagcagaaaaacgacaaagcgagaaaaattattttccactccagaaattaatgatcatgagctcgtatttgatggactctaactacatcgatccgaaatttcctccatgcgaagaatattcgcaaaatagctacatccctgaacacagtccggaatattacggccggaccagggaatcgggattccagcatcaccaccaggagctgtacccaccaccgcctccgcgccctagctaccctgagcgccagtatagctgcaccagtctccaggggcccggcaattcgcgaggccacgggccggcccaggcgggccaccaccaccccgagaaatcacagtcgctctgcgagccggcgcctctctcaggcgcctccgcctccccgtccccagccccgccagcctgcagccagccagcccccgaccatccctccagcgccgccagcaagcaacccatagtctacccatggatgaaaaaaattcacgttagcacgggtaggcaactttgctttttgctccccccctccctcccttcttccctagcgctccccaccctcctcggccccctctggcccccgtcctcctttctctccttccccctctctctccaggagcgactctgggttagcacaattgaactggatttacgagcgagaatgggtaattacatcccccataaattttatggcttagctactctgggcagtccgagccatgtgctacgatctgttatgtatgtgtgaaaactatgctcgctttctaagggcgcataaataattcagtgtcgttacaatgaggattcccctcttattacactacaaagtcttcagcttccttcaacttctttataacccatttaagcttgatgactttatttccaccactccctcctcctgtttctcagagctgaggatggggtgagggtggggggcggggagcctgctgcctctgaaccccactatttgcttttcccctccccccagtgaaccccaattataacggaggggaacccaagcgctcgaggacagcctatacccggcagcaagtcctggaattagagaaagagtttcattacaaccgctacctgacccgaaggagaaggatcgagatcgcccactcgctgtgcctctctgagaggcagatcaaaatctggttccaaaaccgtcgcatgaaatggaagaaggaccaccgactccccaacaccaaagtcaggtcagcacccccggccggcgctgcgcccagcaccctttcggcagctaccccgggtacttctgaagaccactcccagagcgccacgccgccggagcagcaacgggcagaggacattaccaggttataaaacataactcacacccctgcccccaccccatgcccccaccctcccctcacacacaaattgactcttatttatagaatttaatatatatatatatatatatatatataggttcttttctctcttcctctcaccttgtcccttgtcagttccaaacagacaaaacagataaacaaacaagccccctgccctcctctccctcccactgttaaggacccttttaagcatgtgatgttgtcttagcatggtacctgctgggtgtttttttttaaaaggccattttggggggttatttattttttaagaaaaaaagctgcaaaaattatatattgcaaggtgtgatggtctggcttgggtgaatttcaggggaaatgaggaaaagaaaaaaggaaagaaattttaaagccaattctcatccttctcctcctcctccttccccccctctttccttaggccttttgcattgaaaatgcaccaggggaggttagtgagggggaagtcattttaaggagaacaaagctatgaagttcttttgtattattgttgggggggggtgtgggaggagagggggcgaagacagcagacaaagctaaatgcatctggagagcctctcagagctgttcagtttgaggagccaaaagaaaatcaaaatgaactttcagttcagagaggcagtctataggtagaatctctccccacccctatcgtggttattgtgtttttggactgaatttacttgattattgtaaaacttgcaataaagaattttagtgtcgatgtgaaatgccccgtgatcaataataaaccagtggatgtgaattagttttacgtcaatgtctgatggtttctttttattcccctccctctctggcctggtaacatcccatcttctctatagttgcctaagtttactttaaacaaacacacaaatcttagctctccattagtcttccaatgtccttagaagaacaagcaagggggttggggtatgggatcttcagaagaggggatgtggaagattaaggctgatttctccagtccccttccttccccctgagtctgcagagagaccagactcctctgggggcacttcagtggagctgagggtggggagtgtctcacttttctatagttaggtacagtttcttctttttgtcttttctctctcttcccttctccctcctctgtgctgagtaggcctgcctactttgtagacaagggggcaagtttagggagtgggaaggagaatagttttctttcatcttttagggctcttttgggatgagggattaaggaagacatcccctcaacatttgagttcttaaaagaaggaaggttttgagctggtgactctgaagcagcaaagtcacctgtcaggatgccttctctgtttgtttaggcttggaaaaaagactggccagaggcctgggaggtacccttgttatggataggcctcaaaggctgatgcctggagataataaaagacttttacctttttattctctaacttttattatggacctgccaggtgttgcgaagagacttagggagagtcaaggaccaccctctcttcctataacctcccaggtcctggcagcgtatggggatagcctgaacaagtttctctggctgtaaagaaataaattaattaaataaatttgtttccttggggctaaaaaagaaacaaaaaatcttgcctggattacctgaatacattcaagccaaaggctcccaaataattctggtcctgagatccaggccctagcaaggcctgcttaattttttgcttgtttgttaggagaaggtgggaggagggctgttggtgaccttcttctcggacgatttatccatatttcaggaagaaaggcaattagaagtagaagacagagggagaagagatctagggtatgcagggaagccagggataccccttccccctatccccaaattctggagtgaaaggcaacagcaggactaagttgtacaaatcacattggtgtgctttgaatttatttccttttgaaccacttgctggttgttacttggtgtgtgtgtgtgtgtgtgtgtgtatgcatgccctcacacgtgtgtgtgttggggggagtctcttagtcctttaggtctacttttcctccctcagtggtaccctggagacaacaaaacatgctgcctacagtatgaggaggcaggccaacaattatctggagttttttatgtaatcaagtgaattaggggccaaatctgactgtagcccctatcgtcttgaggcgattgcccttggaacagaaaaagggggttctagctgtgcttaggaaaagggaaggaagg

SEQ ID NO: 268 - DNA, 12021 bp, Homo sapiens
  source 1..12021: mol_type = genomic DNA
gtgggcagggtagggagcgtgggagaaggtgctgaaggcttttctggtggtccaactttggttaacttggggtcctctttcctttcttcttcccaagcctcttacgccaagagctcaaagcgcaccgcgcaccccggaacccccaggcgcaaacttaccctgttcctccgcggctggaaaaagaaaaatctagctagaggcataagggggtggcggccccgggtgacctcccaacttagctcttcttttgaggggatgctcctacttctaaagaactcttttttaaaaataaataaataaaaaataatcaagcggcgaaagttgacgtccgcccacgtgaatgtattatataaagcagctacaggaccagctggcttgagagccctggtacctcgggcctccaccgcaccaccctcaggtcccggcccagccaagagcgcttgggggaggggggcgggcaagtggcttttccccctgggtccaggccggctgggaagctgaagccgcagcgcgaagttaggagccctaccgggctgggatctcttcgaggcgcttctgttgggtgttcattaaggggtgagttattgcggtgcgagccaaaggtcacttcaaaggcttatggctgcgcgctttagtctttagaagcgccgggaacgctttgtgtgaggctttcccgggtgtagtttagtgctcgcaaactactgagtcgacaaattgcacagggcagatgcaagagggggactctgtctctctcctttcacctgacggggggtggtcacccgctgagcggtgacagtggtgggggagcttggtctgtggctttgggtgggggtggaaaggatgtttgtttcttaggcgatttgcagtctgatcctgacccagaagtgggcagcccagggccaagagtgtggtggatacttaccggaatgaataaactcagggaaagcatctgatatatttaatgtataaatcaggaactagcgcccaggtcctcttcactgaggctctgtagagcagcccctgaccaagatccacccaagcctatttaccttcctttcctggtgcccttttctgcagcctcccctgccaaacccccaccttaattctgcacggtctctctcttctgcccctaggagagtgtttggcttccgggattgggacctggaggagcatttagaatttggtaggggcaggaggagagcagattggcttccctgcacctctgacccacctggctagagggtctggcgcttccctcacgtccgggctctcccctcccccatccagccatggattttggcgttaaaggggccctcgctccccaggagccaactgagtctgtgttttgccggggagaaggcgtctggatggtcacgggtaccatatacaatagtcacattgactatgacgtccttcaagtgggaaaagcccttcaacatgtaagtgtttgtaagcaagaaccggctgctactgagagttttccattttgttccagattcgcctccacagatatcaaaagaaacctgaagagcctacaaaaaaaaaagagataaagacaaaattcaagaaaacacacacatacataattgtggtgagtgggcatcatttaaataataatttccagtacatttccctctgcaactcaaggtggccatctcaaaattcatacatcaagacatagaacaaagggcagctttgaagtgggtcacttcagtatgaagtaccacccgttacatgaaaaccgatcattggccttcaaatttatggcgctttaatggggcaagcccagtgccttaaatacagggtgcattacagtattgagttatctgggctaaataagagtgatttagaaggcgcgtccaggtcttcttatagagcaaaagaggctcaagcttagagatcgggagaacttgggcggaacgtaaagaagtctcctttcgagcaaacccaaaaaccagtggtttcgaatcccgaagtagcaaagccaacaggaaagggagaatcgttgctcggttccagtgaattcgtggggatgctcagcaaaagtcttggccgccagaaagagatccgtgggcttctgaccctggtttaggcaaaacagggggaggcgccgagaccagctcgagcactagcggattttgagagaaactgaccgcaacctccatcgccttccccctctctttcaacttggatgggctgactctacccgtcggtgatttacgacgattgcagcgctagtcacagcctggcgcctggtgtcccctcccttcccaagccccctcagcttttccactgccaccggcgtacaagcaagtgccgagccggcctccgcaagtcggactagcctcccggcgtccgaggccaccacgggcagcagatttttggtccccagcgaggctgcgcgcgttcgtcccgcctccgaccgccgagcagagctgctagcagaagcaggcgccggtcactttatataatcctgctgctcgcagggtgcaagagcgggaaaagtgcggagtagggaattcttttgctgcgctgcctcctacgcggagcctgctttccactgctgaaaagtgccgggccttgggaagtgtttttcttttcattccttaccgaagcgtttactgccgccgtggtcgcagtcataaattttgctacaaaccacaatgacaggtgcattgatatgcaccgtgagagctccagctgcttaataaccccgtcccctggtcgctgtgagcgccttttatttatttggtatcatattaggtattgatctctagtagcattaagtgcggtgagcaagtatcagggttcggctgctttggaggcgcagcggttgcggcgggccggcgggcccggggaagcgggcggtggccgctcagagaataccttccttccggcaggagaccgtttggccctgtattccgggcctgcggttgggcctccaagctgagttgggcaacttcccagcaccgcaagaaagggcgagccagacctatttggcacccctttcccaggaggagcaggggatggcgccggcggagtttggggaggctgccctggccagttccccgggctagagggtggaggagaggaggagggagaggaaagggcagctgaggacttggaagaaatgagaagccgtgctcgaccacccctcccccaacactggctcatcttcaccccaagacatttgggtcttggagcccaaatgagcaaaggtaccaaagggcgagaaaagaaaggctttaaaaaaagggtgagggggtgatcgaaaagatgagccactgaacagttgaccattgtccaagtgatttatgacccgttcctgctttttaggttcaagcagagttcacaaggagtagggatttctgaaaagaaataagcctttttaccagttttgtaactatattctcaggttttgttttaagagggatcacttttgggaaactgcatttttgggggactgcaaagccatttccagtaaggacagcaccatcactggctcttgcttttggggaaatggacattaaggtagtggattgtcattgagtgggaaatttcttgagacaatgtaaacagttaggaaaacagactctggtttttcaggaagatgcccaatgtttgtacttttgaggtctgtacacagaactttttctaggaatatgccatagaagcaaatatatatataaagccatctgtcccagaagaactggtcagttcctaagtaagctattttaacgtgactggttcacctatctagatcaactttgtcaacttgggaggcaggagggtgaatgttttgcttccacagttgtaaatggaatgacagagcagcagcaagttctggtagtctgagtgtccgatgtgaccattaggcctccagagggttaagactgaaagcaggataccagaaaagcctgaaacataaccaaatccagagtgcctctttcttcagcagggggcaaacatatgtaagtattagtcacagaatgaagacttagctgtccatttgatatccagtaacttttaacagagaatgatatataaaattaatcaaaagaaaaattaagtccagctttgttaagtagatatcctacctacatacatttaagaacaataatggaaacaatttctacaacatagtatcttggtattaagggcctgttcctcatcaagacaaatggcatactcacttatattctaaaacaagacaaaacaaaaagggcaacaacactacctaccaaagactaattagaagaattttaaaatttgggttaggctgtttggtgcaggtggagggaaaactagtgaatcattctggtacctgtggtcaaatccattaggccacataagctgtctagatgatgtggtacatcatgatgaccaggatggaagccagggagagtttctaggaaggaaagttgcctgaaagacagatcaagaattgagaccagggagctgacctatgagttttctttatcaaacagacaaagtgattgaatggtattagttatactttaactctttaggagcctttcagaagaagtagggaggcagggagagaagggaaacccccataaagaagggaatacaaaaggggtaggatttttcttagcttttttttcttcttctaattctgggtccattcatcatgtcatgaaaggttctctcattggttgtggtttgggtgggaggtagggtagaatagattatccagagcagatgtcaataatatctatttatacaatagatccaaggcaaaaataataaagttataaagcattctccactcacccatgttccatgcatttcaaattctagatctctttgcccatttccagtggtatctgtttaaaagtaggggaggtcaaaagtaaaaggtctagaaaaatgtaaatgaaagagaagaaacattttctagcctcaaaatgagtctggaagtctgcaagtcctcctgttggtgtttatcccctagttttctacattgtagattttacactgctgattcatagagcttactcagctgattttcaccctgtcatcgttaagtggactatctggactttcatgcaagatgctgtgattttgaaaccaggtggggggagaccctttttttttttttttttttttttttttttaagttctggctgttctgagcatgttataggactttcatttcccatcaaaaccttgtgctgacccaatgattgactgattgatccacttattaattcacctattcaacaagcatttattgcactaactacatgcagggcactgtgctggatgttaggaacagtagacaaatgacacagcccctgcctgcaaggagcttacagtttagtgggcgaatcagccaacaaaatgtctgaggctataagtacttttccacacagaagaaaggctaaatggacaatcttgaagaaagtaaattgtatctggaggtagagggaagccctttccctcagctacagttgagctaaaaagaaggaaactcttcttacatttaggaaaaattccttctgatacttccagaggttcaaataagttgaacttcataaaatctgccaggcgcagtggctcatgcctgtaattccagcactttgggaggccaagacgggaggatcacaagagcccaggaactcaagaccagcctgggcaacattgtaagaccctgtctctacaaaaaaaaaaaaaaaaaaactaagagctggcgcagtggctcacacctgtaatcccagcacttagggaggcccaggcgggttgatcacctgaggtcaggagttcaagaccaacctgaccaacatggtgaaaccctgtctctactaaaaatataaaaaattagccaggtgtggtggcaggtgcctgtaatcccagctactcaggaggctgaggcaggagaattgcttgaacccagaggcgtaggttgcagtaagctgagatcatgacactgcactccagccttggcaacaggagcaaaattccatctaaaacaaaacaaaacaaaacactaagacatgtagccaggcatggtgggcacctgtagctactgcagagtagctgggactctgaaatactctgaaatagctattaatactgcagaatagctgggactttgaaatactctgaaatagctattaatactgcagaatagctgggactttgaaatactctgaaatagctattaataccaggctaaagtgggaggatcgcttgagcccagtaaattgaggctgcagtgagccatgttcatgccactgcactccagcctgggcaacaagcaagacactgtattaataaataaatagataagtaaataaactcagatccagcaccttgcccatctccccgccgtgaagtgggtaggaagcagagagcatgggctagtccttctatattgactggtcttgccaatgacactccctctggggcctcttgcttttcttctgacaggtcacctggagcctgggggccggcccagctctctcaggattcagcagacattggaggtggcagtgaaggatacagtggtagtcaatgttatttgagcagggtcagcaggccctggagcttcctgagtgcacaatgcagaaggctgcttactatgaaaacccaggactgtttggaggctatggctacagcaaaactacggacacttacggctacagcaccccccaccagccctacccaccccctgctgctgccagctccctggacactgactatccaggttctgcctgctccatccagagctctgcccctctgagagccccagcccacaaaggagctgaactcaatggcagctgcatgcggccgggcactgggaacagccagggtgggggtggtggcagccagcctcctggtctgaactcagagcagcagccaccacaaccccctcctccaccaccgaccctgcccccatcttcacccaccaatcctggaggtggagtgcctgccaagaagcccaaaggtgggcccaatgcttctagctcctcagccaccatcagcaagcagatcttcccctggatgaaagagtctcgacagaactccaagcagaagaacagctgtgccactgcaggtagctccctgaggtggcctactgccagaccaagccccctccagattgacccaaggaagcctagtcagggctggaaatgcaaccttggaggtcatatgtctaaactcctactcacgtcaaaatgttcttttttttagtgttcctgattggggtcatgaccttgcagtgacagggtgctcccttccattccaggctgctggtgctgttgctggacaggtcttatagctattaatagagagtgcttccttatatgggcatatctgttttcctgggctgctaattataactccattccctcttccacccaacagctcttcaagatttgaagataggtattacaatccccaagcctaggtgattatatagcccatatcacacgaatctcattcccttaaactcataaaaactaaagtcttagaaagtaccatactaagtactttctaagcattatctaatttaatttttcaaagaaccttttgaggtaggtatatgataacatccccattttacagataagaaaactgttagagaggataggcaacttgcccaagattctgaaactgcaaagtggtggatttgaatccagtcagtctggctttaggggctgctaagcataaccatgagtctctatttggcccacctcagcccaattctcccactccagcaaatccataatggggaggtgcctgtcctagtaggagaggatattctgggagacagtaacagccttggatttctctaactggaaggggagcccctccagttggggccttctctaggtccacccagggcatgtagaagataggcatggccaggaactctgagggctgttccttctctctgcttagactgcttggttcctgaaattttctgaccttgtggtatctgatgtggtttatcttcaggtagatgaacttgcttccaggtccagggcaagtttggggcctggggtgtggcttgctatcagggatctggtttgcctgatgttttctggggctgctgctcctagggagagggtattatcctgcctgcaacctccttttcctgcccctccttcctcagctgcaggctcaggccctccctcccaggagaaatccatttgtcttccctgggagggagtggacaagcagctgagaggtggcagggtagtaaaagccagtgttgaggctgctgctcctagcactgtgaatactcaaaatgcttccagcctggccttggactccctaaaatacccaggcagtgtttttttttgtttgtttgtttggttggtttttttttattttttattttttggtttgtcacctccctggctttgagtgcagttgggctgcagtggggcgccaagatctccatccccatactttgctgggggttggtggggggctttgcccagaggccagctcctaagcaaggcaggctggagctatttcctcttcctttccttctccataccccacccctggcagcagaggctgggaggagtgttcaaaggagtctggcccttctttgacagagggaggccttaccagctgctcctggtctctcattaaactctttcatggcctttgggtgggtatgggatgatggactaggctgcaggggagagggtgggcagagtgaactggatctcagaaggctgatggaggtttcaggtgcgactgataggtaggcctagtagggggttggtaggtaggtgaattcccccttggaatcatacctctcaaacggcccttcccctccccagccaggattggaggtggggggagggaggaggaaaagagaaccagggaagcacccctctccagtcctgagggtccccacccactcgctcagcgccctccctctctccctccctgcccaggagagagctgcgaggacaagagcccgccaggcccagcatccaagcgggtacgcacggcatacacgagcgcgcagctggtggaattggaaaaggaattccacttcaaccgctacttgtgccggccgcgccgcgtggagatggccaacctgctgaatctcacggaacgccagatcaagatctggttccagaaccggcgcatgaagtacaagaaggaccagaaggccaagggcatcctgcactcgccggctagccagtcccctgagcgcagcccaccgctcggcggcgccgctggccacgtggcctactccggccagctgccgccagtgcccggcctggcctacgacgcgccctcgccgcctgctttcgccaaatcacagcccaatatgtacggcctggccgcctacacggcgccactcagcagctgcctgccacaacagaagcgctacgcagcgccggagttcgagccccatcccatggcgagcaacggcggcggcttcgccagcgccaacttgcagggcagcccggtgtacgtgggcggcaacttcgtcgagtccatggcgcccgcgtccgggcctgtcttcaacctgggccacctctcgcacccgtcgtcggccagcgtggactacagttgcgccgcgcagattccaggcaaccaccaccatggaccttgcgaccctcatcccacctacacagatctctcggcccaccactcgtctcagggacgactgccggaggctcccaaactgacgcatctgtagcggccgccgccagcccgaactcgcggcaaaattacctctcttgctgtagtggtggggtagagggtggggcccgcggggcagttcgggaacccccttccccgctcttgccctgccgccgcctcccgggtctcaggcctccagcggcggaggcgcaggcgaccgggcctcccctccatgggcgtcctttgggtgactcgccataaatcagccgcaaggatccttccctgtaaatttgacagtgccacatactgcggaccaagggactccaatctggtaatggtgtcccaaaggtaagtctgagacccatcagcggcgcgccctgcagagggaccagagcttggagagtcttgggcctggcccgcgtctagcttagtttcagagaccttaatttatattctccttcctgtgccgtaaggattgcatcggactaaactatctgtatttattatttgaagcgagtcatttcgttccctgattatttatccttgtctgaatgtatttatgtgtatatttgtagatttatccagccgagcttaggaattcgcttccaggccgtgggggccacatttcacctccttagtccccctggtctgaactagttgagagagtagttttgaacagtcgtaaccgtggctggtgtttgtagttgacataaaggattaagaccgcaaattgtccttcatgggtagagtcaggaagcccggtggcgtggcacaacacactttggtcatttctcaaaaaccacagtcctcaccacagtttattgatttcaaattgtctggtactattggaacaaatatttagaataaaaaaatttcccagtcggaactgtatctgtgttaatcatgcacacttgcaagcagatcactatgcctttatctcgcacaatccccatggaaggccccgaaacagactgacactttgaaaaaaatattttatttatttggagtctagtgcataaattggttctcgggatacttgattactttccagctattgaaattaggggagggggaaatgaggatgcaaacctaagaaggttctgggcgggatgatttgggcagggctttttgaaagcagcgcctgctttgctgtttttactgccttctttctagacacaatcgacttttacactggggagaccagagctcacttttctgcattaagtaacaaaaaataaactttgaaagaaaactgacaatcaaagaaaaaacacaagagaagttgtaagaagaattgagctatgaaaaagctaaggtgtagaaaaagaaaccatcatttggagacgcgtacctaagctttttctctaggaaatgctgtcatgaattcttcctttgtagtgatcattagttcatttctaaagaaaacaaacattccccaagatgtaaagtaataatatttcattaatgaaacataacaagtataaacaccttgtttactcctgtttcttatacaaaatgggcaaaaatgtcttcaaggatttataaccattttgtaaatattaatgtggcttctgctaggggtggacaacttcccggcttctatgggaggggccacttagaaaacgccttcagataaggttcaattcttttgtatttcagcaaagtcagcccacgcatctctatttggtttgacaaataatgcaactcctactacatccccgatgacacgaagtgaaattcctattgtgtggaaataatttaacttctaatcttctggtggaacaacaatcgtttctatttggatgtttgtatttcactaagtaatgatggctcaaaataatatttagtttccttgttcctttgtgctgtttttaaaatggcatgttagatttgggggtgggaggggatatccttttgctaaatttcactttatctgagcaggtttaaaatatatatgttgtagaagtgtatcaacagaataaatgacttcaatcgaaggcacattttacccactttcaaggcttaacattgttttctatgaaatttgcatccataggcagaatttctaattgtcttgtaagaaattattttttaagctattagagaaatcaaaggagagctcactgccttgcagggattacaaccacctttcttaactggctaaatattaactagctgaattgtcaggctgcttagattcagcccgattttccctcatctcctcttcctaccataaataataataaaaatacgtaatgtgtcatggctccaggcgttttccagcacagtgtgttaccgcaggagtatctgctgagtctgcgggtgtctgcaaagccccaagtgtcatttgcggcttagggtttcatggattagactttaaac

SEQ ID NO: 269 - DNA, 4836 bp, Homo sapiens
  source 1..4836: mol_type = genomic DNA
acctggcttggtcgggcagtaggaaaaggagtagacacaggatattcccctctcgcttctttttcttctgccgctgagggcatttgttcctttctggaaaataccacttggtaaggaggagggttatttggatcctggtgggggagggtggttaataaagccgccatccttgggatggattatttttctttctttctttctttttttctttcttaagaagaatattctggttgttcgcctgcttggtaaccctgaccctggcagaagaatgagggaactcattgcttcaaattgtcgccaagcccattaggctacctgaactgtctcagaaagtgcgggtggctgcgtcgaacggtggtggctcagaggaagagattggggccggcagcgacctaggtacctcactctgggtgggacccagaggttgtaacgttgtctatatataccctgtagaaccgaatttgtgtggtatccgtatagtcacagattcgattctaggggaatatatggtcgatgcaaaaacttcacgtttcttcggaatagccagagaccaaagtgcgacatggagactagaagcagccggcgctggtcagccgcctcgttctgttttattaccttggactccaggaggatcagctgcgcctggtgacatagagcagcttttcctctccagaagctcctcacctttaaacagagtatcctctgggtgctgaaaagaaagaaagacagaaagagagaaagagagagagagagagaaagagagaatgcaagcctaattggttgcatggatgcagggccaaagggctaggttttggggtactagggagtgaggtacaaggccagcttgcccagtcccagctctgccctccaggaacatgaggtgcaaaggtacccaaatgggggcttgcttgtatttggggcctgtgggaagaaagcaagcttcaaagaagcccagtggggagctctagggtgcattttgacaaggtggaggtgcccttgccaccatcccagcccacccccagctacatgggcaagggcagcgagggccccctgctattttggcagggcccagctttggctgggaacccccgggcctgggcactggtagaaagcatggcggttactcattgcctaatttgattcaagctggccagattctggtaacttttgggtgaccctgatgaagacaaagccaggacggcggcctttgtatggcagaatccctgctcccgccggctgcaggcagggcgggcaggcaggaaccctcctcgcctggggcactctgcccaactcagaggcgagttcacccacccacctttcattgctctgtaccccaataggaggattcattctcccttgagctgtgcctacttggtgtcggggggcgggggttgcattcagctgggggtgagtggaagggccacggaaggttggcaaaatcagtggcagacaaaagctgggattacctgaggggaatggggtgctggggactggaactacattaatatctggcaggggctctcaaatgtgccatagcaagctacttgattacacgtatgttatttagttaaatttgtgaaaattatgagatgctcaccaacccggtgataaacttgctccctcgccattggctggcctggtcacatggctgcccaactttattcagttgacagcaagtaggagggccctatggaaggagaaaaaaagacaacacgagaaaaattagtattttctaccttctgaaattaatggtcatgagttcgtatatggtgaactccaagtatgtggaccccaagttccctccgtgcgaggagtatttgcagggcggctacctaggcgagcagggcgccgactactacggcggcggcgcgcagggcgcagacttccagcccccggggctctacccacggcccgacttcggtgagcagcctttcggaggcagcggccccgggcctggctcggcgctgcctgcgcggggtcacggacaagagccaggcggccccggcggtcactacgccgctccaggagagccttgcccagctcccccggcgcctccgccggcgcccctgcctggcgcccgggcctacagtcagtccgaccccaagcagccgccctccgggacggcactcaagcagccggccgtggtctacccctggatgaagaaggtgcacgtgaattcgggtaaggctagggtccagtaacctttctgtccacatcccagcccgttagcctgggtcctctggaagggggtgcgagtaggtgggggcgtgtggagcttccatgggcgccgcaattactctccccataaatttttatagctgagggagcaggtcaggaccatgtggctggctgctcggctgtgggcgcaaaagggggtggggatgggggggtgggggaggactccattttcagagcagggggaaggctgtggaggagcgggggatttccaaaatgcttgagggttccggacctggtggtgggcccagaagaaggagcacatttggggatcccgcaagcctggggtatgtgggtgtgtttgaggaggtgggtgggagtgagcgtgtgcgccggggagagggcgggagggaggaagcaagcgagcttgggagcgcgcggggagggccgcgggcctcggggcgcgccaggaagtgagcggcggaggcgaggggcctaactagtggccgggcgctgacctgcctgtcctgtctgttttgtctcgcagtgaaccccaactacaccggtggggaacccaagcggtcccgaacggcctacacccggcagcaagtcctagaactggaaaaagaatttcattttaacaggtatctgacaaggcgccgtcggattgaaatcgctcacaccctgtgtctgtcggagcgccagatcaagatctggttccagaaccggaggatgaagtggaaaaaagatcataagctgcccaacactaaaggcaggtcatcgtcctcatcttcctcctcatcttgctcctcctcagtcgcccccagccagcatttacagccgatggccaaagaccaccacacggacctgacgaccttatagaagtggggaccctgggcccatctctccctgcgcaccaggctgagccgaagctgcgggggcaggccgggcctgctgtcacctcgctgggctctaaggtactgtggggtggacctgggacaagcaggccgccctcggactaggttagcatcctgcccgagggcagccccctccctagagcgggatggggatgggagggggggcgggattctctctctaagtatattatatggcaggagctactgagaacataaaatcttggcgagtcattaaacttatgaaaatcaccgctcttggattttgaatttgcaaatgaaggttggatgctttatcccactgtgaatttggacattctcccccactccacccctccagggtgctttgtggcttaataatgtgggggagttgaggcagaaggttggccacccctgtgctaggtgctttcagtggaagccagagagctgggtcaggatttctggactttctgggttgtctatggaatttcatgtgattaaaaaatatatattttgctcccagtggccccacctccaaagaaatgggtctaagaaggaagtaaaaatgggttattttatgtttagatatttgcttaaatatttatttgttgggaaatgtggtacagaaataactgacaccttcatgccaaaaatcttaaaaaggtgaaaggggctgaacttcagggagcagaatcagagatatgtgcacttacttctgaactccacccctccccactctctggaaatgtatataggggggccttaacccttccagaaggaagcaaaggattcactcaaagttgcattcttgaaaatatatttccacatgtgtttttttcagcactgtgcttacaaccagttctgggtgattaaaggaaagggaaaaaaaccaacaaatggtccaacattttccttctggggaaagaaaacaaaacctctatgcactgggtcattagataatgactgaattttctgttccaactggattccaaatgccctaaataccctcatatagcagtgttttacaggaattagtgtatggcctgtgtaggggaggggctgtgcagtggggagaaagtgggaaggtgaggaactcttgctttaagaaggaaaaaaaaaaaaccctaattgaatctagaagtccacaaaagttagccttagagtttttttccccctgaagttttaatttttttaaaaaccaaatctaaggaagttttcctcagctcattaattagaagcagaatttgtaaaagtataaaagttttcaagcactcgtctttgccttgagaatagtggttttttaaagaatcactctcaacaggggagatgtcctctagtcgtttttcttctgcctctcctgggaagggttcaaagttcatttttctaaaatgctgaccctcaagcataaggaggaagaagtcaaagttaatggccagagttcatatactcagatgaaaccagtcttcccaaggcctcaggctccaaaaaaggttgtagctatcaaaaagtgaccaaagtgggaaagggagaaaggataagcttaaaatttaattttaagatccagaaggggggtatttttttcagtacttcaaaaacactttagaaggtttctgttgtaatttaaaaaatatatttaagtgggagggaaaaaagagtttctctgtaggcttgttctttggctgtgtctcctgagagctgagggcaggtattcactgcagtccctaggctgaaattccgcttctctgaagtgtcttccaagccttggtct

SEQ ID NO: 270 - DNA, 9799 bp, Homo sapiens
  source 1..9799: mol_type = genomic DNA
gcgggggaaccctctggaatcaataaaggcttccttaaccagcctctgtcctgtgacctaagggtccgcattactgcccttcttcggaggaactggtttgtttttgttgttgttgttgtttttgcgatcactttctccaagttccttgtctccctgagggcacctgaggtttcctcactcagggcccacctggggtcccgaagccccagactctgtgtatccccagcgggtgtcacagaaacctctccttctgctggccttatcgagtgggatcagcgcgggccggggagagccacgggcaggggcggggtggggttcatggtatggctttcctgattggcgccgccgccaccacgcggcagctctgattggatgttaagtttcctatcccagccccaccttcagaccctgtgctttcctggaggccaaacaactgtggagcgagaactcatctccaaaataacttaccacgctggagtgagaccacgaatggtggggaggggagggtcccacggacatattgagggacgtggatacgcagaagaggtatccatgtggtggcagccgggaaggggtgatcagatggtccacagggaatatcacaaactcgaattctgacgatgttctggtagtcacccagccagatgagcgcatggagttgggggtggggggtgtcaaagcttggggcccggaagcggagtcaaaagcatcaccctcggtcccttgttctcgcgtggatgtcagggcccccacccaccgagcagaaggcggactcaggggcgctccagggtggctcgagctcacacacgctgagtagacacgtgcccgctgcaccctgggtaaatacagacccggagccgagcggattctaatttagacgcccgcgaacgctgcgcgcacgcacacgtgtcctcggctcgctggcactttcgtcccgccccctccgtcgcgtgcgggagctgacccggaggggtgcttagaggtatggctccgcggggtcaaaaggagaaggatcagtgagagaggcatccccacaccctcccctagaactgtcctttccccatccagtgcctcccaaatctctcttagtccccaaatgtatccccgccctaaggggcgctggtgggaggagctaaatgtgggggcggggctcggagtccagcttattatcatggcatctcagccagggctggggtaggggtttgggaagggcaacccagcatcccccgatcccagagtcgcggccggggatgacgcgagagagcgtggtcgcccccagaaggccctgggccatcatgccggcctccacgtagaccccaggggtcgctcactcctgccagctcgccttcaccaaggccaggagcttagcgcacgctcgcctcccgcccccccgccgcctctgccgccgccccctccttggaaaccaagttaccaacgttaaaccaatccccaagcgcaactctgcctcccccacaccccacccgccgcgccgcgcggagccgtcctctagcccagctcctcggctcgcgctctcctcgcctcctgtgctttccccgccgcggcgatgccagggccttcgccagggctgcgccgggcgctactcggcctctgggctgctctgggcctggggctcttcggcctctcaggtaagagccccgctctggttcggggtggacagggcgggggcggagtccctggacctgagaaacggcctcctgtccctcccagctctgccctcgcctcgctcccacgcctctgcccccacctcgagcctgagtcttctccccttccccctcctccccaacacacacccgagccccagcttcctgactcctcgatagcccctacccgcttcgagatcctaggtgttcttccgcacccaacccttcgccctggagacccagtgtctctcctgtccgctccccgggtacctccttacgctgtgctgtgcaccatggtccacggactggcatcttccccactcgcggtccgcgaagactccatctctccaactaccctgactcagaggcgctgttcccgctccacccagagccctggcaaccgggtccctcagctgttcccgcggttccttccatgagcccagccttgcgtcccggctccgtgttcttcaccgggtgtagggtccttcctgatccttgacccagcctcgtctctcctttgcccttgccgcaaacgcactctcctcgtatcccggcattctgccaggaccctgagaactggttcatcccccatcccccatcccgggtccccttctctcagccttgctgtgttcatccaagaacccacctttcctctcctctacgccctccccccatgctttcccgccgctccatcggcgctttggagaccatggctctctgctaccacgtcccagagacaccctcgaggtttagactctgggagtgcgcctttaaaccggaggcctgggcaggacgcgggacgcctgggttctttccctggctgcagcctctcctcctcctccccgccctctgagaacccttgactcgacataggggcgctaagatgtcagggagttggctccccaggctcagcccgcgtttccctgggcagcggtctcgcaggagcccttctgggcggacctgcagcctcgcgtggcgttcgtggagcgcgggggctcgctgtggctgaattgcagcaccaactgccctcggccggagcgcggtggcctggagacctcgctgcgccgaaacgggacccagaggggtttgcgttggttggcgcggcagctggtggacattcgcgagccggagactcagcccgtctgcttcttccgctgcgcgcggcgcacactacaggcgcgtgggctcattcgcactttccgtgagttctgggtggccacgcgcgtactccactactctccctccctcccaggccccgccccctgggtcccagggtcctccccttcaggccccaccttctgttccaagtcccggtgttcaaagagctgcggactcttcccccttgcagagcgaccagatcgcgtagagctgatgccgctgcctccctggcagccggtgggcgagaacttcaccctgagctgtagggtccccggcgccgggccccgtgcgagcctcacgctgaccctgctgcggggcgcccaggagctgatccgccgcagcttcgccggtgaaccaccccgagcgcggggcgcggtgctcacagccacggtactggctcggagggaggaccatggagccaatttctcgtgtcgcgccgagctggacctgcggccgcacggactgggactgtttgaaaacagctcggcccccagagagctccgaaccttctgtgagtgggtgtggggaggagatggggacccagtggggtcggtcggtgtttaggaggtttagaggtagatacatctgaatgctgaccccgacttcaaccctcgccggctgagctgtttccccctccgtgccttgaggatgataatacgataagatagtgcatgtcaagtgcttaggacatattgagcgctcggagttagttcaaacttggttcttcgacccctagccctgtctccggatgccccgcgcctcgctgctccccggctcttggaagttggctcggaaaggcccgtgagctgcactctggacggactgtttccagcctcagaggccagggtctacctcgcactgggggaccagaatctgagtcctgatgtcaccctcgaaggggacgcattcgtggccactgccacagccacagctagcgcagagcaggagggtgccaggcagctggtctgcaacgtcaccctggggggcgaaaaccgggagacccgggagaacgtgaccatctacagtaaggaaggaggcggggtctccgcggctccgaggtgggaccagaggaatgcgaaggcggggcgaagagtgggcgggacctcagtaccggaacaggcgtggcccgaggggcggggcaggtgggggcggagacgtaatcgctggggaggaggagcctgtacagcctgagaggcggggcgccgtaccctagttcgttctcagcaccccgaggattcgggcagataaggggcgggccttgaccggagggaggggtatggtcagtatactacgaccaaatgctccgcccccaggcttcccggcaccactcctgaccctgagcgaacccagcgtctccgaggggcagatggtgacagtaacctgcgcagctggggcccaagctctggtcacactggagggagttccagccgcggtcccggggcagcccgcccagcttcagctaaatgccaccgagaacgacgacagacgcagcttcttctgcgacgccaccctcgatgtggacggggagaccctgatcaagaacaggagcgcagagcttcgtgtcctatgtgagttggtgataacccctcgccccccaccttctggtgacttccaaggacccgcctgctccctcaccgtgtcgtggaggcggagccatttcttacgtctaagcctctgtaaccccacgccctgcccgcagacgctccccggctagacgattcggactgccccaggagttggacgtggcccgagggcccagagcagacgctgcgctgcgaggcccgcgggaacccagaaccctcagtgcactgtgcgcgctccgacggcggggccgtgctggctctgggcctgctgggtccagtcactcgggcgctctcaggcacttaccgctgcaaggcggccaatgatcaaggcgaggcggtcaaggacgtaacgctaacggtggagtgtgagtgggggtgcgcagggtgcatttctatctggttcaaggtctggagggtggccagcctccagggaagagtaggagtagggtatgaggtgtccctttgggtgaggttttgggaaagggaagaggctggttagtggggttggagaaagatcttggaggatggaagggaccgggtgggcgtgcccctagcctagggcgtggtatttgggcggagtcgtggaaaggcgggcagtccagagtgtttaagtttttagacgaaaaaggcgccactggtggctcaggaagctcccagacagagtgcatgcctcgactagcgtgacacctccttggatcggcgtccaagggttatgcagggacaacacttcgtggaagccttgccgcgccaaggagggtctagggacgtcagatttgcccccaaaccccaaagccaacaatacactccctcctccagacgcaccagcgctggacagcgtgggctgcccagaacgcattacttggctggagggaacagaagcctcgctgagctgtgtggcgcacggggtaccgccgcctgatgtgatctgcgtgcgctctggagaactcggggccgtcatcgaggggctgttgcgtgtggcccgggagcatgcgggcacttaccgctgcgaagccaccaaccctcggggctctgcggccaaaaatgtggccgtcacggtggaatgtgagtaggggcaccgcggagttaggcaggatctgtgggacaaccccggctggacttcctggcccccgtgtgagcccctgcaatcctgtttcccagatggccccaggtttgaggagccgagctgccccagcaattggacatgggtggaaggatctgggcgcctgttttcctgtgaggtcgatgggaagccacagccaagcgtgaagtgcgtgggctccgggggcgccactgagggggtgctgctgccgctggcacccccagaccctagtcccagagctcccagaatccctagagtcctggcacccggtatctacgtctgcaacgccaccaaccgccacggctccgtggccaaaacagtcgtcgtgagcgcggagtgtgagcgaggcccaggcgggtagggagcaggggtgccccacggtccaggcactccctgacatcccccatggctgctttgcagcgccaccggagatggatgaatctacctgcccaagtcaccagacgtggctggaaggggctgaggcttccgcgctggcctgcgccgcccggggtcgcccttccccaggagtgcgctgctctcgggaaggcatcccatggcctgagcagcagcgcgtgtcccgagaggacgcgggcacttaccactgtgtggccaccaatgcgcatggcacggactcccggaccgtcactgtgggcgtggaatgtgagtgggggcagcaccggatggaggggacacggtcctcggaagaatgactcgcagcggtgggagcattcaagggcacctctcccaatcccattctcggggacagggaattccagcctaaaccagggggtaatgaaaattctagccaggcgcagtggctcaggtctgtaatcccaacactttggaaggttgaggcggatgaatcacttgaggccaggagttcgagaccagcccggccaacatggcgaaaacccgtctctacaaaaattagccggtcgtggtggtgggcgcctgtggtcccagctacttgggaggctgaggcaggagaatcgcttgagcctgggaggcagaggttgcagggagccgagatcccgccactgcactccagcctgggcaacagagtgagactctttcttagaaaaacagaaaaagaaaattatagggaataggagcacggccctcctcaaatcctggattagaacactgacctgggcttcacctccttccattcggtgaagaagggcgaggaattttagccgcaacagcagcctgattgtcggggaaggaggctctgataggaggcaggatcctcttctgcccatcagaggcgcggtggtctcccatcgatcgttgtgggccggagcagggcatttgatcagtggctgggccggcgctaagccccacttcaccttctgtgcccttcagaccggccagtggtggccgaacttgctgcctcgccccctggaggcgtgcgcccaggaggaaacttcacgttgacctgccgcgcggaggcctggcctccagcccagatcagctggcgcgcgcccccgggggccctcaacatcggcctgtcgagcaacaacagcacactgagcgtggcaggcgccatgggaagccacggcggcgagtacgagtgcgcagccaccaacgcgcacgggcgccacgcgcggcgcatcacggtgcgcgtggccggtaagtggcagctggggagaggcggggcgaggtatctgagagggggcgtgacctgggtcttggggcggccggccccgcctgcctccctctcggtcccggtagactagacggaagtgggacagagtagaagtcaaaggtgccttagcgggtggggctgttgatcgcactttgaggggtgggagatggaggtggcagggggactgaattcaaggggagggaccctccggggctgtcactgctgcaggaaaggactttaaaacttgggctggattctgcgtggtggaaacttgacccaattcacaatccactgtggggaagattggggagggaccaaagtcattggatgttggagggagagaggggtcaagatcgccttctctcacttcctgaagctcctggggctgggttctctctggggtcgggggaacctgacctggtcctgccggtcctcattttttgggggatggggagagttgacttgtcgccagggggctaagtgtggtcacgggtttatatccccatgggctgaagtgcgatataaatcgggactcgggtcgccctggcactgggagtggccttattgcatgggttgtctcccttctcccaaggccagacagtgagctccccggggcatgaggactgacttcgtgcctgtgggagtgcggggggcggtgggagaagccccccggagcttggccaccctccgcgagggtctccaccccgcaggtccgtggctatgggtcgccgtgggcggcgcggcggggggcgcggcgctgctggccgcgggggccggcctggccttctacgtgcagtccaccgcctgcaagaagggcgagtacaacgtgcaggaggccgagagctcaggcgaggccgtgtgtctgaacggagcgggcggcggcgctggcggggcggcaggcgcggagggcggacccgaggcggcggggggcgcggccgagtcgccggcggagggcgaggtcttcgccatacagctgacatcggcgtgagcccgctcccctctccccgcgggccgggggacgccccccagactcacacgggggcttatttattgctttatttatttacttattcatttatttatgtattcaactccaagggcgtcacccccattttctacccatcccctcaataaagtttttataaaggaactccctgtctccgcttctgtttctgcaaggtggaacaagcccagggttccagtcgtgacctcccgagttattcattcaaaaagcgatttttgagagggcctggggtggtggcttaggcctgtaatcccaggacttgtgggaggcccaggtgggaggatcccttgcacccaagagtttcagaccagcctgggcaacatagggagaccctacaaaaaatatttttcaaaaattagccaaggccggtcgcggtggctcatgcgtgtaatcccaggactttggaaggccgaggcggccagatcacgaggtcgaggtcatgagatcgagaccatcctggccaatatggtgaaaccctgtctctactaaaaatacaaaaattagctgggcatggtggtgcgcgcctgtagtcccagctattcgggaggctgaggcaggagaatcgctttaaccccggaggcagaggttgcagtgagccgagatcgtgccactgaactccagcctggcgacagagcgagattccgtcttaaaaaaaaaaccaggcgtggtggctcacgcctgtaatcccagcactttgggaggccgaggcgggcggatcacgaggtcgggagatcgagaccatcctcgctaacacggtgaaaccccgtctctactaaaaatacaaaaaaaaaaaaaaaaaaaaaattagccgagcgtggtggcgggcgcctgtagtcccagctactcaggaggctgaggcaggagaatggcatgaacccggggagcagagcttgcagtgagccgagatcgcgccactgcactccaccctggcagacagcaagactccgtctcaaaaaaaaaaaaaaaaattagccagggccgagcacagtactctcgcttgaatcccagaactttgggaaactaaggcggggggggggggtcacttgaggtcaggagttcgagaccaccctggccaacgtggtgaaacaccttctctaccaaaaatacaaaaaaattaaggccgggtgaagtggctcacgtctgtaatcccagcactttgcgaggctgaggcgggcggatcatggggttagaagatcaagactgtcctggctaacatggtgaaaccccgtcactactaaaaacacaaaaattagccgggcgtggtggcacatgcctgtagtcccagctactcaagaggctgaggcaggagaatcgctttaaccccggaggcagaggttgcagtgagccaagatcgcaccactgcactccagcctgggcaatagagcgagactctgtctcaaaaaaaaaccaaaaacaaaaacaaaaaaatacaaaaatttagctgggctgtagtggcacacgccctgtaatcccagctactcgtgaggctgaggcaggagaattgctagaacccgggaggtagagatcttgccattgcactccagcctgggcaacagaactagactctgtctcaaaaaaaaaaaaaaaaaaaaaaaagtgttttttgagggggctgggcatggtggc

SEQ ID NO: 271 - DNA, 9952 bp, Homo sapiens
  source 1..9952: mol_type = genomic DNA
cataatattacaaatattttgagtagacagtgtttccacatttaatggagtatcagttgcttcagattttcagaactgggaagatttactggtttaactaggttgtttttgatggagaaaaaccttattttcttttgtaagagctgggagcaaacacgtttatgagtgtgtcggaatcccgtgcttaaaatacgctcttaaattattttctagtcttattttacaatgtctcattgtagtctgtcttcaactattttatccaaaataaacctccagaagaaagtagttttcatttacttagctcatgttttggtttagttatagtcgctatggatttggccaaataaaaaggcaaacaacatgacatttctattttgttttaaagcaaaaatacttttgggggagtaaaatgttgctggaggcattaggcaattaaatatgggcattctcctatttctgtggcccgtccctgaagttacatgttcagtaaaacacaaaaacaccgccaatgccacctcaaaagcacctgctggggagcgttggggtgaagagctgtggggtcggagggacctgcccaggggtccgtgtgctcctggagctccaaagacacacaggggtccaagagccaccacggataagttatcaagtcacacaatcaacattatagctgaggaaaggactttagttaatcacacttctggattacatgtggcaattttaaaaatttaccagggctgggctgggcgcaggggctcaagcctgtagttccagcactttgggaggccgaggtgggcagatcaggaggtcaggagttcgagaccagcctggccaacatggtgaaaccccatctctactaaaaatacaaaaattagccatgcgtggtggtgggcatctgtaatcctagctgctcgggaggctaaggcaggagaattgcttgagcccagaggcggaggttgcagtgagccgagatcgtgccactgcactccagcctgggtgacagagagagactccgtgtgaaaaaaaaaaaaaaaataccaggtctggtttttgaaattctttctccgtattaaacaccaaaacttaacatatagtttactttgtgttaaacaacaacagtatggccgggcgcggcagctcatgcctgtaatcccagcactttgggaggccgaggcaggcggatcacgaggtcaggagatcgagaccatcctggctaacacggtgaaaccccgtctctactaaaaatacaaaaaattagctgggtgtggtggcgggcgcctgtagtcccaactacttgggaggctgaggcaggagaatggcttgaacccgggaggcggagcttgcagtgagccaagatcgcaccactgcactccagcctggtcgacagcgagactccatctcaaaaaaaaaaaaaaaataccaggtctggtttttgaaattctttctccgtattaaacaccaaaacttaacatatagtttactttgtgttaaacaacaacagtatgttttaaagcaagtatgtctttatttgtaagcatattactgaaacgatcaaatgaacagaagtggataaacgtcgagtcacttggctgagaccatacgcatcttccgtactgcttgtattaggatgcaagattgaatgtgtcttttttttaaaaatgcagccttgtgttgcactctgaaataagtgatttaaaaagaaaaacatgatacagagatcccatcctgaccttggaggcttggataaagctgtggggagacagcctcatggtccagccaggctagtccgcctgcttcaggactctcaagatctccccaagactttcaggatcagctgctgttaatcaaacaagtgcttataaaatggaaattgggacaaaggaaatgttaaatttcctccctgcaaccaggcagatgagaaatatggaaataaggaaaagggaaaatgaagatatgacaaagttgatgaaaaggttgaaatagtgatttatacatgatgggcaatcaagtgccccttttgccctgttttttggagagggtgtatcattgcctcaatggtgcgtctgcctgcactgagggcattacacatggctgactcgacctccctgcctctcacactctgtgtattttgtgaagctccacaaacggggtcacgtcatccaggtgaggccaccaccggtacagaaacctctcggcaatggttcttagccagggggtgactttgacttcacccctcgcctccctctccagcagctcccacagctcctcctgggacaggtagaggatgcttttcgtttcactgggatccgggttcagagtgacgtttttcctcacaagcagaaggtaacaaatttcatgctctccccaaattctgtctgattttgccttgtggtgatagattgtcatgaacacaatgtcctctggagaaatctattgacagaaattggtgcagtgttaacaacgctaatgtaaaacacagaatttacagaaaaatagagaaaataaacacatttgttttcctcagaaaatgaacactttctttggtaattgataatttccaaaacctcgattttagctaagtaaatttttgtggactcaagtctgaatgataaaccggctttggtttcttggttccagtaaacctgtctgtcttcatttaaagaactaaccgtgtcacacacacatcctcaacagaaaaccccgtagaaaccggctagcgttgtcaggagaacatccatcctctcttaaacgtgttcttgagtggatgaaggtaacacatgctcacaggatcctggacattctttctacacttgaatttctttcttttttttttttttgagatggagtctcgctctgtcgccaggctggagtgcagtggcacaatcccggctcactgcaacctctgactcccaagtagctgggattacaggcgtgtgccactacgcccagctaatttttgtacttttaatagagacggggtttcaccatgttggccaggatggtcttgatttcttgaccttgtgatccgcccgcctcggcctcccaaagtgatgggattacaggcgtgagccaccacgcccggcttgaatttcctcttcggtgtgtggtcgacagattcctgcacagtctcaaccctgcctgggacacatagggactcacactgccccatccacagctacattcacagccccattcacagccccattcacagctcattcacagccccatccacagccccatccttcatcctcatggtgcttcatgaggtcaatggtgtagatccagcctggactttgttcaccgtctgcccgctgccaacctggactcccgtggacacagctgagactggatgctgtgtgtacctgctccccaggaattcccagctctgcttgcagacgcctctgggctgccctcctcactccgatggcatccttttcttccagttctgctgggttgtataatgggtggctactacaggagtcggtaaaataccctggaaaaaatgcatgtgggaacatccctctttattcctgaaaagtgaatatattaaatacaaatgcagatgcttcatgtaaaaccatcatccgtcatcagcagaagacagcctggcggggggagtgggtttgtcatgggctctcagagcagcactcgcctccagcctccacggctgtgggcttggtgagggtcttccacatgaccacctggcggggctggccctgaccgctcctgcggcccttcctgcagatgtgcacacacatgtcccgtggcactatcccagtatgtcttaggagagggactggttcctactcagttttgtacccacagaggacctgagatgccatggggtggcgggaggaggtggtggggctgtgggctgggtggctgcaccagctgggctgaggaagctgggctgcactttgagggtggtgatcagtgagcatggtttcacaggaagactgctggaatacctttgaccaagtttccttactgagaggttctacttaatttacccaagtaacagcaatagcgctatgacgggaggtcacactctcctcagtaaatctctgttccctctcgttcctcagaccctcagtgcttccttcggtcactctgcaaggagtttggctgaagttgaatccactcttgcaagtacaagagctggtactcccacctgcccctatgtatcctggaggcggctaacacatgataggaaatcttagctccaggggctttatttgcaaactgttgactatgtactacagttgaccctcttaactttgcagctcctgaatttttctgaaacaaactttgcattcagctccatcaaggagcccgtgagtacaacttgaccagcaagtatggtggtgggtttgggaatgggcaggatgtacccactgcggctccgaggaagaactaagggaggagaaaacctcggccacagctggccgtgcttagccattcgctttaatggctcaggcaaggtctggttttgaaaatttgaggacagcctaggccaaaacactttaaatgaccacaattgacgtaaatgctgttcccctctaaaaaattttttggccgggcccggtggctcacgcctataatcccagcactttggaaggccaagacaggcatatcacgaggtcaggagatcgagaccatcctggctaacacggtgaaaccccgtctctactaaaaatacaaaacgttacccgggtgtggtggcgggcgcctgtagtcccagctacttgggaggctgaggcaggacaatggcgtgaacccaggaggcggggcttgcagtgagccgagatggcgccactgcactccagcctgggtgactgagccagactccatctccaaaaaaaaaaaaaaattttaagttgtaattttaagaagtacaagataattaaaactctaagacctgtaagataatttttattattattacctagttaattttatgctaaatgctattttaatcccctaaatccttaggttgataaattcctctgcatttaagtaacttgccgttgcaaagaaacaacaaaacaaaaaaacccagaaactcatatagtttcttacttttttaaaaaagaaaacccagcctactgaagagctatcagcataattagcatctgcctaagctgccgattttctgcaggatgagctgccagctcaccacagtgcggcactgagcaccagagagttcctgtcccagattcctccggtcaagtcacatgagatgctctcttcagtccggggcttggttgaacggactcaccaggaaacgtgactttcgtgtccgacctctgctgtatcaggattcgattcttggtgttaaacaagacaacgctgaaggctcggtgcagcagccctgcaaaggtaagtgccatttgtgtgagtgcatgcctggagtctgtacgattgtccttcgtgctttttgtcctcagtctgtttctcgtagaaaagcctgtgattgtggcacctgggcagggcaaaggggactgctggatgcccaaacacaacgtttcagaatctcagcggattagaacactcgggaaactaaaaatagatctaccagatgacccagaaatcccactaccagggcaaatatccaaaataaaagagatcagtctatcagagagatatcgcagcattcctgggtgctgagcaccatttacgacagccaagatatgagatcaacctgtgtccgtggaggtttgaagggttgaaaacatgagggttagatacacagtggcataccattccaccacaaaagaagaatgaaatcgggccgggtgcggtggctcacgcctgtaatctcagcactttgggaggctgaagtgggcggatcacgaggtcagaagatcgagaccaccctggctaacatggtgaaaccccgtctctactaaaaatacaaaaaaattagctgggcgtggtggcaggtgcctgtagtccaagctactcgggaggctgaggcaggagaatggcatgaacccaggaggcagagctggcagtgacctgagattgcaccactgcactccagcctgggcaatggagcaagactctgtctcaaaaaaaaaaaaaaaaagaagaatgaaatcctgtcatttgtagcaacatggatggaactggaggccattgtgttaagtggaacaaacctggcacagaaaaacaagtatcacatgttctcactgctatgtgggctctaaagaagttgatctcatggaggcagaaaacacaatgctagacaccagaggctgcgaagggcagtggggagggatgacgagagggtggttaataagtataaacataccgcgatagagaaggaataatatcagctgttcaatagcacagtagggtgactgtagttaacaacagtgtattatatgtttcaatgtggctagaacagaggatttggaatgttcccaacacaaagatatgatgaatgtttgaggtgatggatatcccaaaatgccctatttgatcattatgcatgacatggtggtatcaaactatcacatgtaccccattaatatgcataattattatgtgtttataaaaaagacacaaaaatgaaaattaaaaaataataaaatggcttaagatggtcaaagaaaaccagagctggacaggagttaaagcaggaaagtctgactttactgagaaccatttcaataggggaaagagacctccatggagaaccagcctaactgcacacaacacccaaggagcaggctggggcctatggattaaaagttactaagagaaaacatcagtgggaagggggttctggctacaccgacctaacaagacctgctgaagacaggcctgcgtgatcagacgtcacctgggagggacggggttgaggaatttaatcagatgccaaggtcagggttctcgctaaaacaacctggtagaattcttgctgaaacaggatcttacgaggaagagcacggatgcctaggagaaggtgcaggagcctgacaagggcttgaccaagcaaagacgtcatccaggtgctgctccccgagccttctaaagacggcacagcaagcacacaggtgacccagtggtcgcctcctagccggaaaggcctagactctcttcttaggttgccgtcgggtgggaaaaatgggaaaaccctgggaactggacagagaaaatgggcgggggctacctttctcaatgttttcgttcagatggcaattcctcttggtgtcggcaccaataaccttatcattctcatccacaacaatcagcatttcctccaagcgctgcaactgacgcctgtcaacccagtcaagatttatgtcagacatagctgctggctgtgacccgacctgaaatagatgcacacaaatgcctctttatgtgaaagatattgccatctcgtttttgctatgtgttaccaaccacattaggatttagcatacaccttctctacaagtgacagcaattgtgttgaagcagcacagttctgagatatggaaggtgaatcatctgtttctaatgtggtgtctctctgaacgggaaatcttgggtacatacatactcctcatgttttccaggtttcctttagtgacgagttaaagaatccccgccccaccacacacacacacacacacacacacacacacacacacacacaaaacacaccgaggtaaactgtaggtaacactctttgtacaagtttttggggaaaagtgcagccctgtgcaaaaccactggacctggatcagacgtggagaaacacacagccttgtaggaaagctacgtcacccacagaagggctatggtcctcttcagagccaagcagattcttaggtgaagatcttctcacaaaatgttttcagggccaggagcggtggctcacgtctgtaatcccagtactttgggaggccgaggtgggaggatcacttgaggtcaagagtttgagaccagcctggccaacatggtggaaccctctctctactaaaaaatacaaaaattagccaggcctggtggcacatgcctgtattcccagctactcaggaggctgaggcaggagaatcacttgaacctgggaagcagaggttgcagtgagccgagatcgtgccattgctctccagcctgggcagacagagtgagactctgtctcaaaaaaaaaaaaaaaaaatgttttcagggtcatttatcttcatgtaaaaccttctcatcatccttttctactttttaaaaaaatgcattcacgtctgtccattatcattactgttaatattttcagcaatctgctcctcctctttgcaaaaggctgtttgacttaatgcatggacatgagatacaatagaaatgcagagaaaacaattactgaatatgtacaaatttagatcataaaagaaagaattcccacaaggtaaaacatatgcactaacctctcttggaagctggagactcctgggtatcagatgtggaactcaatgtgcaagttgaaccagggcccttttataccctggggatgtagaaagatatcagctaaggcaatctgatatttttgtattcttaacaagaaaacacaccccggtctctctctatctctccatctctttctctctatctttctccctctcaattgagggataatagaaaattgttttgacacaatctcactttaaaaaatgcttttagtttttaaacctagggtaagttattttctactctatggctttctttttttttttttttttaaggtgatgtctagctctgttgcccaggccagagtgcagtggcgtgatctcggctgactgcaacctctgcctcccgggttcgggcgattctcctgcctcagcatcccgagtagctgagattacaggcgcccgccatcacgcccagctaatttttttgtatttttagtagagacgaggtttcaccatgttggccaggctggtctccatctcctgacctcaggtgatccgcccgcctcggcctcccaaagtgctgggattacaggtgtgagccacggcgccgttcgatggcatctttttaattcacttgctgtatatatcatcccagattttaaaaagaaaaaataaaggtggcaaatggaagagaaaaataataaacattgtgactaaaattactgaataaattcttaggatagctgaaaatcgataaataaatgcaagaccttggaaaccaatgtgtttggaagagctaaaaaactgtataatttcttgcctatcatattccaaatatcatctaccaactaaagctctaggccaaatagttttgcaagtagggtctcttaaaatatcaaaaaaatgtttgccatatctgtcggttctctcagggaatatgaggagagaagcacgatggacgcatgactccgctgactttggcacggataatacagaacaaaaataacacagcagcagtgatgggtaatattctataaaaagattaatgtgttttgctcttttgtctttccataagttcacctttatgcatgtaatttttagttacgtagaaaatcaaaaggctatgcctgaaatgttttccctggaaatcagttctgagactcaggaataaatggtctgtttgaaacttgtttcttttgcagtcagaagagtaagaatgggagaatgatactcttttaaagatctaaaaaataataaataagtctatgaattaggctttgaggaagaaactaatatacaataccgtacctattataatccaacaactctaatagtaataataataatagtaagacagccagacacacattgtgtccttcctttgtgccagtttctattttaagagtttaatgtatattaattcatttgatcctcacgacagctttctgagataagcgttattttttattatcacagcatcgataaggaactgaagcacagagaggtaaattacctgcccaaggcaatgtggctgcagatgcagctgagcccccagaatctgt

SEQ ID NO: 272 - DNA, 20710 bp, Homo sapiens
  source 1..20710: mol_type = genomic DNA
tgtccctcaatatggtcctgtccccatctcccccccacccccataggcgagatccctccaaaatcaagtggggcgatgctggcgctgagtacgtcgtggagtccactggcgtcttcaccaccatggagaaggctggggtgagtgcaggagggcccgcgggaggggaagctgactcagccctgcaaaggcaggacccgggttcataactgtctgcttctctgctgtaggctcatttgcaggggggagccaaaagggtcatcatctctgccccctctgctgatgcccccatgttcgtcatgggtgtgaaccatgagaagtatgacaacagcctcaagatcatcaggtgaggaaggcagggcccgtggagaagcggccagcctggcaccctatggacacgctcccctgacttgcgccccgctccctctttctttgcagcaatgcctcctgcaccaccaactgcttagcacccctggccaaggtcatccatgacaactttggtatcgtggaaggactcatggtatgagagctggggaatgggactgaggctcccacctttctcatccaagactggctcctccctgccggggctgcgtgcaaccctggggttgggggttctggggactggctttcccataatttcctttcaaggtggggagggaggtagaggggtgatgtggggagtacgctgcagggcctcactccttttgcagaccacagtccatgccatcactgccacccagaagactgtggatggcccctccgggaaactgtggcgtgatggccgcggggctctccagaacatcatccctgcctctactggcgctgccaaggctgtgggcaaggtcatccctgagctgaacgggaagctcactggcatggccttccgtgtccccactgccaacgtgtcagtggtggacctgacctgccgtctagaaaaacctgccaaatatgatgacatcaagaaggtggtgaagcaggcgtcggagggccccctcaagggcatcctgggctacactgagcaccaggtggtctcctctgacttcaacagcgacacccactcctccacctttgacgctggggctggcattgccctcaacgaccactttgtcaagctcatttcctggtatgtggctggggccagagactggctcttaaaaagtgcagggtctggcgccctctggtggctggctcagaaaaagggccctgacaactcttttcatcttctaggtatgacaacgaatttggctacagcaacagggtggtggacctcatggcccacatggcctccaaggagtaagacccctggaccaccagccccagcaagagcacaagaggaagagagagaccctcactgctggggagtccctgccacactcagtcccccaccacactgaatctcccctcctcacagttgccatgtagaccccttgaagaggggaggggcctagggagccgcaccttgtcatgtaccatcaataaagtaccctgtgctcaaccagttacttgtcctgtcttattctagggtctggggcagaggggagggaagctgggcttgtgtcaaggtgagacattcttgctggggagggacctggtatgttctcctcagactgagggtagggcctccaaacagccttgcttgcttcgagaaccatttgcttcccgctcagacgtcttgagtgctacaggaagctggcaccactacttcagagaacaaggccttttcctctcctcgctccagtcctaggctatctgctgttggccaaacatggaagaagctattctgtgggcagccccagggaggctgacaggtggaggaagtcagggctcgcactgggctctgacgctgactggttagtggagctcagcctggagctgagctgcagcgggcaattccagcttggcctccgcagctgtgaggtcttgagcacgtgctctattgctttctgtgccctcgtgtcttatctgaggacatcgtggccagcccctaaggtcttcaagcaggattcatctaggtaaaccaagtacctaaaaccatgcccaaggcggtaaggactatataatgtttaaaaatcggtaaaaatgcccacctcgcatagttttgaggaagatgaactgagatgtgtcagggtgacttatttccatcatcgtccttaggggaacttgggtaggggcaaggcgtgtagctgggacctaggtccagacccctggctctgccactgaacggctcagttgctttgggcagttactcccgggcctcactttgcacgtgtgcttacctagtggagacaaaagtacatacctcggtagagcgcgcacgcctgtaaccccagcactttgggaggccaaggtgggtgtatcacctgaggtcaggagtttgagaccagcctggccaacatggtgaaactccgtctctactaaaattacaaaaatcagccaggcttcatggcacatgcctatagtcccagctacaggcatgctgaagcaggagaatcgcttgcaccccggaggcagaggctgcagtgagctgagaccacaccactgcactccagcctaggcaacagagtatgagactccatctcaaaaaaaaaaaaagtacctacctcagagttcaaactagtgaatattaggaagtgcttgagacagtgacaccaaagtgcacaataaatactcgccagtttcattattattaaagaatccatttgaatgtcagctcaacacagcctcctataccgaggcattgtgaaccgcatctccccagcttctccaggcttttccaagaatcagggacactgtagcctgttggtctcagtgtatgacagacacggaggaagcacatctttagctgatacttaaacagagaccctgagcgcacatacacccgcgcacacatgcatggagcttcaccttctctgtcattctgcagtgaccaggagagcaagagctcccacctcccttcaaaacactgtgcccatcccgggcactaaggcctctttaaagcacggcacctccacgagggagggccacagccacatacactccacctggcaggtggacagcgtgagcacgtggaccatagcagggacaaggtgccccggccagccccaacgccctctgccgctgacagggacagaagccctctccagctgcgtgtgctgcagaggccatgcgtagcctccagctgcattctattccactccagtgcctgggccagttagcaccagtgtggaagacagtgagctggctccggacaacagggatggaggaaaggtcccacattcacattcctgatacgtggacaaggtgaggggccgcaatcgctctggcagcattttaaagatggggaagtagcagacacccacgcgtgaaggcaggagagccccaactgtggtggaaatggccccagaatggtagggccaagcctagctccagacaccccagagccctggagaagccaagactgagggagaaagcctgagggaggagcgccccagtccccagggaccggcctggtgcagagctgcagctgatgttcccctctgtgcagccccaccctctgcctcgctgagctccctgctgcgagggcctcgggtgcaagggggaggcaggtctctatctcatggagctgtcagatgagacatcgcgatcggagtcctcagcctcgcttggcggcggcggcgggtcgctaagcgggaccgcagtgaaagcaggagactttctagaaaaaaacaccagttgtcaaccttggggcaggcaggaatcctgaagacggacggcactcctcctcctgctgcctcaccctctggcagcccgtgagaagtaccggaagcgagggcggggccgcgggatggcgagggagcggcagggactgaactctctccaaacccaccctgacagggaaatgggccccgcctgtgtcttgggaactcagaggctgaggtcaggcatgatggctcacgcctgtaattccagcactttgggaggcagaggcgggtggatcacgacgtcaggagttcaaggcaagcctggccaacatggtgaaaccccatctctactaaaaatgcaaaaattagccaggtgtggtggcgggcgccttggaggctgaggcaagataatcacttgaacctgggaggcggaggttgtagtgagccaaaaaaaaaaaaaaaagaaatagctgaagtcacagtaggagagaagctgctgagcctccagcaccctgactctagggccttggctttatgtctatctgcagtatttttgtgatttttaaaaattcactttcttgttgcggtgtaacttacacagggtcaaatgcacaaatcatggccctgactttagataaaaatctgcccccacaacccttctgttccttgccagtttttaaactgcctctaaccaggggaaccaccagagctggtggccttgggaggtttcagccctcccgtcatgaatggacatagctcatccaactgccaagggagagagctgtgggtctgggccagccccaccaggtaactcccaaagggcagccccacagcaagatgtgacccagtcattgcctgagggtctctggggctgtgttccaacctttctccccgctgtgtccccctggaaggccccatgcccaggggaggcgcctaccggtctccagactgggtgatgagccggcggcaggtctccatctgcacgtccaggccgcgcttcatgctgcacatctccatgtactcgtgcaggtgccggttcatgtcgttcttggccgtggccaactccagctgtggtggggcaggcagggccatcggggttaacaggtggcgttcacagcgcctctgttgcccccgccaggaggccaacacgccaagagcagtggctgggccgggggcccaggcagccattactgaaggctcagattttaaaataaaccagaccaaggcagaaggcagcgaatacaccattgtttcctctgcttttcctggaaatctttgcctatggaggaatgcaaaggtactgctgcaggctgtgttcttttaagactgataagagtggtgaggaaagtcagtgtgggcgggatggagcagatccacaggctcccagggccacacaggttcctatggggcccggctcacccctcatcccctgtactgcgctggtcctgggctgtcccctcactgcactgtgagctcccgtaagggttagcgacaggttttcctcatcctggcagacccagacctcgaagggaattaactctctctgtgacccgtggcatacaagcctggctaactgctgaaaggggcccaatcctcttaccattctctccttatcactttattttctcacctaaaagccattttcagacactaaaaggaagactcccatattggaggtgccattgattctgagacctgtcctgatttcagaaatgtcacacgtggaaaacacggggctcagaatcaaagaaatccggtctccctccccgggcccattctgcagcccacactctgaggcaggcggagaggcagggcccaggcagcacaaactcagtgccagggacagtcgactgcctctctttgttttgggtacaaagggcaggggccgcaaggggaagcaaaatgaaacttcctggagatgacgttcgtgactgcctgagtgaagagaacggggaggataccagctgccataatgtggattggacagagagggtgggaacttagagaaagaaggaaacaggttacagggccagacagcagagatggtcaggacagtgacatttggggtgagatggcggctggctgggtgagaagccctagtggggacagcttccctggcaggcttggatccacagctggggccccacagtagtgggaggagcaggacacggtgactgttcaacccagggggaaaatacagtgccaccagcccttgttcagatcagctgcctacaccccaatttctccaccttggaagaaccggagtgcagggagctgggttctggaaccatcactcagggagactgggaagaaggaaatgaaccaaatatattctactgaaatacaaggctagtactgccaccagtagtctctgcatatgtctatgtccccacttaattcacaaatttacagcaggaacaaggtcaggaggtgaacgtgcatgtcaggagatgtccttgacaagccaccttgaaaactgcaggctcgctgtgtgaacagacttgggggtgggacgggaggagacagagagaggtgaggagcggtggggaagaactgcctcccgcccaccactctgggccttggctttaccttgctccatcttagtgaccctgagagatcaaaggtcacaaagataaaggcaccttgggtactcctgaggtcagcaagtcctcctaacggttcccctaatgcagaagtccccaaaccccaggccacggaccagtacctgtctgtggcctgttaggaaccaggccaaatagcaggaggtgagcagtgggcaagtgagtgaagcttcatctgtatttacagctgctccccatcactggcattacagcctgagctccacctcctgtcagatccgcggcggcattagattctcacaggatcctgaaccctaccttacgtgaactgtgcatgcgagggatctaggctgtgtgctccttatgagaatctaatgcctgatgatctgtcactatctcccatcacccccagatgggaccgtctagttgcggaaaacaagttcatggctcccactgattctacattatggtgagatgtataattatttcattatatattataatgtaataataatagaaataaagtgcacaggccgggtgcggtggctcatgcctgtaatcccagcactttgggaggccgaggtggtggatcacctgaggtcgggagttcgagaccagcttgaccaacatggagaaaccccatctctactaaaaatacaaaattagccaggcgtggtggcacatgcccgtaatcccagctacttgggaggctgaggcaggagaattgcttgagcccgggaggcggaggctgcagtgagccaagattgcgccattgcactccagcctgggcaacaagagcaaaactctgtctctaaaaataataataataatttttaaaaatagtaataaagtacacaataaatgtaatgtttgaatcatctcaaaatcatttcccccgggtcagtggaaaaactgtcttccacaaaccagtccctggtaccaaaaaggttggggactgctgcctaaagtcattgcactgggagagaggaggagtcagatgatttgaaaatacttttttttttttttttcctgagatggaatcttgctctgtcacccaggctgtggtgcagtggcacaatctcagctcactgcagcctccacctcccagattccagcaattctcctgcctcagcctcccaagtagctgggattacaggtgcccaccacaatgcctggctactttttgtatttttagtagagacggggtttcacatgttggtggccaggctggtctcacactcctgacctcaagtgatctgcccgcgttggcctcccaaagtgctgggattacaggcgagagccaccacgcccagccaaaaatagcttaaaaggcatgattccatttaagatattattttcgttctttcagatcatgttttacactgggcacttgaggtccagggaagactagggagagatggcagcccgagatctcttctcacgaagatggccgcacaaaggcccctagttggttgaaggcacagtgaaaacacaaaccttaaatccaccatccaaaagagggagacaagaatcaggtcaggcaggaggaggaaacagtgagccgcggtagacgggagggtggggagtactggtttcccttgccatgtctttagctagcagcacaaatccaggaaacctcatctacctggccaagaaaaccaggtttgatgcaggagcaggacagtttgatgtgtgttgggagaatgagtatataggaaaataatttctcgacttccttctcaaacacctccaatgtgacagcaataagaataaagtcaaggccgggcgcggtggctcacgcctgtaatcccagcactttggaaggccgaggcgggtggatcacgaggtcaggagatcgagaccatcctggctaacatggtgaaaccccgtctctactaaaaaatacaaaaaattagccgggcgtagtggcaggcgcctgtagtcccagctactctggaggctgaggcaggagaatggcgtgaacctgggaggtggagcttgcagtgagctgagatcgcgccactgcactccagcctgggcgacacagcgagactacgtctcaaaaaaataaataaataaataaataaatgaaaagaataaagtcactctctccttatccactggtttcactttccacggcttcaggtacccaaggtgaaccttgatctgaaaatattaaatgaaatattccagaaataaacaattcctaagttttaaattgcacgctgttctgagtggcctgataaaatctcactctctctgccgggcgcggtggctcacgcctataatcccagcactttgggaggccgaggtgggcggatcatgaggtcaggagatcgagatcatcctggctaacacggtgaaaccccatctctactaaaaaatacaaaagaaattagccgggcgtgatggcgggcgcctgtagtcccagctactcaggaggctgaggcaggagaatggcgtgaacccaggaggtggagcttgcagtgagccgagttcaagccactgcactccagcctgggtgacacagcgagactccgtctcggaaaaaaaaaaaaaaacctcactctatccagaccaggacatgaaccctccctctgtcccaaggatccacactgtctatactgcctgcccattagttacttaggagccatctcagtgatgagattgactgtcgtggtatggcagtgcccgtgttcaaggaacccttatttttacttcataatggccccaaagcacaagagtagtgatgctggcaatttggatatgtgaaagagaagccaaaatatgctccctttaagtgaaaaggtaaaagttttcaacttaataagaaaaagaatccgatgctgaggttggtaagctctacagtaagaatgaatcttctatccgtgaaattgtaaagaaggaaaaagaaatttgtgccagttttgctgtcacacctcgaactgcaaaaggtaccgccacagcgcacgctaagtgcttagttaagatagaaaaggcattgaatgtgtgggtgggagacatgaacagaaacacgttccagttgacagcaactggacccaagctatcaggaggtcagtgctatctttggtttcaggcatccactgtgggtcttggaacacatgccctgaagataaggggggactacgtatgaatctcccatgtgggcctgaagagaggctgagacgcagagaaggctccatgcctctcccaaagtcagagcgtcgggaaaggaccacctcaccaggccaggagagctcacgggggtcccgtccatccctcctcccacagcaacagcaacctccattctgtggttccacaaatccttcttcctttgtttgtatttttgagacggagtcttgctctgtcgcccaggctggagtgcagtggtgcgatctcggctcactgcaagctccgcctcccgggttcacgccattctcctgcctcagcctcccgagtagctgggactacaggtgcctgccaccacggccagctaattttttttttttgtatttttcgtagagacggggtttcaccgtgttagccaggatggtctcgatctcctgacctcgtgatcttcccgcctcggcctcccaaagtgctgggattacaggcgtgagccaccgcgcccggcctccacaaatccttcttgcagctcctaaagcctagagtttgagctaaagcaccagctccacttgcctctaggtacctctagaaggtacttcaaggcttgggaaaaagcatggagatttctctgttatctcaaaggctgagtggaagaaacaggaaagtcccagtccatctctgagtgccatggcactgatagtgttaataataataaaacagtccccactatgctacactcgctatgagccagacactgccctaagctctatatatgcattatttcatctgatcttctaaacaaccctataggtgaggtattattaaattcctcattttacaaataaaaaggcccggcacagtggctcatgcctgtaatcccaacactttgtggggccgagttaggaggactgcttgaatccagaagtttgagggcagcctggaaaacatagtgacaccctgttctctgtaaaaaaaatcaaaaaattagccgggcgtggtagcacacgcctgtggtcccagctacttgggaggctgaggtaggaggattgcttggatccagaagatcacggctgcagtgggcctggagtgacagagcaagaccctgtctcaaaaaaagaaagaaagaaagaaagaaagaaaaagaaacaggtgtagggctggacacatggctcatgtctctaattctagtactttgggaggccgaggcaggaggatcacttaagcccaagagtttaagacctgcctgggaaacacagggagacaccatctctacaaaaaaatacaaataaaaattagctgggtatggtggcacacacctgtgggcccagctactcagaaggctggggtgggaggatcactccagcctaggcaacagagtgaaacagagtgagaccttgtctcaaaaaagaaaggacagaaagacaagggagagagggagggagggatagagggggaggggaagagagagagagagagaaaggaaggaaggaaggaaggaaagaaaggaaaggaaaggaaaggaaaggaggggctcagagggaacaagtaacttattacaagttcagggtggttgtaagtaacagagctgagatttgaaccgatatctgtctgtttccagagcctgaggtcttcagagcccaccaggaggactatagctgagagatcactcctcctcccaagaccttggtctctagggtcctgcagcagggatgaggccactgcgcctgcagccccactcaaaaccctctgggacaccacgcccctggcttccgctcctgcccttacctctatctggtcaatggtctcctgatactccttctcccgggttttgaacagggactccgtatctttaatcaccttctccaggctatcttcctgctgctggagtagaaagggaagcgggggaggccagccaaggagggatgggatgggacgcattccaaagggccaagtcagggagagagagagagaggaagtctggttaaagaaactggagaaagaaaagcaaaaggataaaggaagaggggagacgcaggtagaggatgacagccacatggggggacagagcaaggagaggagcgggggagtgggcttcaggctggagaggcagagccagagggccctgaggccgggagcagaggttacctctccctgggcctctgcagctgccatggcatagcctgagaaatcctcccaaagcagcagggtctcctcagtctcctcccaagtcaggctgtcacagtcgtcctcaaaatcatactccctcctagagacagggaacccgggtgtcagggcgggcggggcctcgtcctggcgggggactggggagctccggcctcctgggctgctgtggcgtcggtgctgcgggagcacggcctgcggactcacagctggttgagcatgcgctgcatctcctcgttgatgctgagggctgtgctctcctcctcatccccatcgggctggcggggcccctcactctccgacagggaggtgtcctcctcgacggcagccttgcgctcccgcttccgcccccccatggatgggaccttaatgggagacaagtgcagagactacagagacgaggccgggtgcatgaggagaaagggcgggagcgggaggccgggcagagagggtgggaatgggggagaagcatgaaccagtaggaagggggggcagacagagagaaaagtcacagttacaatgacaggaacagaaacacggacagtcaccaagggccagacacacagcgggggtcagggctgcaaaccgagaaggcagaacaagaagaaatcgagaagaagagcagtcagacaaggaaggaagggctcgctggggctgcagtcagatgtgcatgatggctcaagaggaaatttttttctaaaaaaagtctttttgattaaatgactcaactaaaaaaaaaaaagctttaggacgcaaggaggatgagtgtgcaatgtgtacaaaagagaacctgaatcacatccagatctggaaagccgggggagaagggagagaaagaaatgcagtcaagagaacaagagatagagagaaaaagggggaagagcaaggaaaagggaaagggcagaaaaaaatccgtgctcaagagcccagcgggcccaaactgagggccaggaggcctaggcagcttagaaactgggactgggacattaataagcttgcgtgagatcaaactaaccagcttcttctgtggaggaagcaagagagaagatgagaggaagagaggagaggaagcagacagaggagagagagggggaagggagagacggcgttagagacagcttccacgatgcccctcctgatgctgctccttaccccccagtctagccccgtgagggccccagttgccaggtaaggctccccaagcaggaggcagggcctgcgttccaggccagccgccacggaagcatccacctgccccacccacccctgagagcagagggcagctccgtcctcacctggaacatctggatcatgtcctcgcagttgcgctgctgagccacatcgcagagcttggcggtgatgtcgatgcggcggcagatgtccatatccaccttcatggctttctcctggatcttggtgtccagctccgacaggttctgtccagggagcccagggaacagtgaggaggcgcccagttctccagacaaggacgaattaggcctggcaaggtcctcatccttcccaccacattgcaccggtgcctcttctgtggagtctccctgagctgactgcacccctcttcctgggtagcggtggcctccccacagcactgtgtgaatatgctgggcatggggcggctcgggccactgctccctggccaaacggaagccctggagggcatggccagtgcctgggacatgcagggggctcactggaacgactagcggtcctcatcctcctagaacttacattcccagagagaaagagactcctgggaattataagagtggagaaaggactataataatcgcaacagctaacactcttccagctaacactgcatgctgggcactgtcccgagtacatgaccaccctcacaatactcctgcagagcgcacgcgtttatttccccacgccaaaggtgaggcctcagaggctgaggaatcggcccagcgccccggcgccagctgcagagcctccaccccagaagctgctcactaactgctctgcaaccccaggccctcagaagctgcgccacctctgtgacgcaacaccgagacttttgttgcttgtctttctctggagttaggggtggctaggggaaaaagggaaggaaagcaaagagaaggggaggagccgtggacgggaggccaacaggccaacactagaagggcctactcttctggcctcagaagcctcacttcgaccctcgggaagcctggggctgcactcacgttactcatgagccccttgaagaccaccagctcagccttcaactgttccaccttcagtgccagctcctcctggcaggcatcagcctcctgggcttcctgcagttgggagaaaccctgatgttggtggcactgccgaggtgggaggaagataaagatgccaaggagggacagggagacggcagcagggtcatgggcagacaggggtacccagggaagcaccagcagcaagtggggcgccaccctcacctcctggagctcatttacacggtcttgcagctggatccgcaccgtgtactcctcttcccacctgacagacatgggaagggcggagagagcttaggtacagagtccttccctgcccccatggctccctgtccccacctctctggctcaggcctcagaccccagttctggttccctggatggggaggagcagggcacaggaatgcctggccagccagctggtgaccaactgcagctgtcacgcggctctgtgcttcctgatgggcgtcgagctcgccagctgccttcccggaacctccgggctgtgcaccaggagctctgtttgggcaagtgctgaggctccggtcctccgtgatgcccatccctgctcaggccccagctcagccagctgtccggctggcctcattgcccacctcctgcccacaccagaccaccaggtccacccggcccagtctcccaccttcagtcgcacagatccgggctcccgcctcctgcccgcaccagaacagagctcgtcgagcccgctgccctgcctcttgtggtatcatttaaccctgtaaaagcatctgcaggacacatagtgtatcaacagagtgggtcaagagcctggtaggagacactcaaagtccttccccactagctccagaaactacccacccagagcctcctctaagggagtcacagagaggtgaccagactggctcagaggccggaagtcccacagcagcatgacagcagtggacacacgagcctggggttactagcactcaaacccagagggaaagagaaagtagagtatgtaaaggggcccggtgagtacggcaaatgagaactagacacagcctgttccagggcccagaattcagagattaagactgcaagtgggccggacgacaccctgggccacagggcagggtcctaggtagggcatgcttcccagagccagctttgtcatgtctcatcagccatggcaggcagtgcatattctattccatcacagagatggaagccagggcaacgtgctgcttaggacccgcccggcattccagggccctgcagtctagctggcgtagcagcacatctcaaatcctgttcctgtgagctcatcacttctgtcaacccgagaagggaggggaactgcaccaagagagaaacttcaacacaagaaaggtggttaggaaggggccaagaagacagcaagaaaattaaaatctgagtgggcagcttctgaagccttgggtgaagccctttcttccccttccctccatcttccttcctgtgtcagcctctgggtcccatctcctcattcacagccgcactgcagtattcctaataataactcctccacatcacctcgactgcccctccctgctgggcagagcaggaggaggcagccagcccagccaccaccctgctggctccccacacagcccagctcccagccttcctggctcccagcccccttccctgtgtgtcccgtaggtgcttctcccctcctccctggcattctcatgcatacagtcaggccactaagggaaccagtcgcatcagattatgttttcttagctaagacccttatcttttctgggtcttggtttcttcatctatgatgtgaaggcatgaactgtggtgccctcatgcgccgggagcccacgagtccctggagggagacagtaagcctgtcaagggcacgctaaccctggacaagatgtgtgaaagagggcaggaggggctatctgacagtgagctcaacagagcctggaagaaacttaagtaaggcagttatagctaaaggttaagcctaaggaaatcttacagggtaaaaaaaatctacaaatgaatcatctggaagcccactacagttctatttgttctttggccagacttcacacagacaggttcattttcacctccatttccatctggtctcacttataaggttcccttaacatgggcagaatttgagagcgatatccatgtgttctgcatggaccaaatatctctcttccaaaaaactgtatccctgggttgaagagagaaagcagggaccattcctatgttgggaaaatgggggctcaaaaaaaggtcacgcacaaggcaggggagctgaaaatagaacgcaggaggcctttagctacctcccagtgtagcgctcaagccatcccaggccttccaggcagaagacaggagttacagtgttgctataaagagaccagaatgagggcagggaatctagggaggaagaagagtcactgccagtatcacgcaccatccgaatccagctaaggctctctacacagcagcgtgctgcagagcgatgagctaatcagtccccaaggaataactccttcctgtcctggacagctggaccaaggacaaacgctccttcagtttaaaaaaaaaatgctcctgagaacagcagttgttcctgtggttatggatgtattccagaactgtgcctgtgccactgctgagcgcgtagttaactcctgcaggggcagagcaggctggttctgggtggcagaacgatgatttcaggacaactgaaactcccaaggacacataacatggaccacaactaaggaagccagcacgaggacaggactcaagctcagaaagcctgctgatcaggtcaggagtttgagactggcctggacaacgcaaaaagaaaaaaaaaaaatagccaggcatggacatggtagtgcacacctgtagtcccagctactcaagaggctgaggcaggatgattgcttgagcccaggaggatgaggctgcagtgagctgtgatgacgctactgcactccagcccggatgacagagcaagtccctgtctcaatattttaagtcaagggtctgtagtcatgtgttcaacgccacttcttgccatcactttgcaattattgaaatgggcatactgagctcagaaagcaaatctgatgctttcacgggagacagagccacatttgtgttctgggtgggatcactagtgcaggagaacactacatcttcttctgaaggcaaaatgcttgtaggttttgcctctttactttgcatttacttctaaaattgcacttgttcacctaccagtgtttacgaaatcctgtatttgggatgctttttctataataaaatattatcatttatgggaaaaaaaaaaaaagaaagcctgctgatctgtgatctggtaaactccagcagggtggagatccctgaaggtcgcccctagacccagcggtcatttcctagaacattcggccaatcctcacccagtgctgaatctccgccacactgggctgcataggtagttcccaggcccgcccacaaggggtcataatagctgagatgagaggggaggccgccaaaccaaagcctgtcagtcacccgctccctcctcaaggcttgggttggagtctgcaagacactacctctgctctcactcctgtcctatcggcttggttatcagccatctaaggaatccacttggtatacagccagcactcctggcatcacatccctttcccttgccccttggggccgggctcctctcagacagccaaatcttcatccacagaatgcaccgggcccgccccgcggcctcgcggtcctagggagggcccatatcccagcttctccctgctcagtcccctgctggctctccactctccctccccactggcgctttatactgccaagattcccctgtcagccctgctctccaccctcaccctagtgaattcccttcactctttcttttcccagtttgttgacctactcaagcaatggcttgaggtcccggagcttttcctatgaaaccacagcaggtacctggtttccatcaatattctttgggaaaccttggggtgtgaaagaatcactcgttgcaaggtacagcccctccctcaccagccccttccagtttcactcaatttagtctcccaaatttacgctatatccttgcctcctacttttgaagtttatatccctaacctgccccagggctgagaccggtagggcagagccccagtccctttcacaccgcacaaaacccgcagttaagcctggatggcagagacaagccggaaaagtaggaatccccccgtgttccgctcccagcgtccttcttcctgtcacgagcagggcttctgcattctctgcggattctagtctccctgcatccaattgcttccaagctcctcattacacagcacaaactttactctcattcttttcacccctgattcttcggaacccacaccaactcgcggcccgttgtgagtggtatgacacagagagacctgtccccctttcccaatccctacctccgcttgtactcgtcccgctcccgcttcactttggccagcacgttgtagagagcgcggatctcgggcgtgatggtgtcgatctggacgcccaccccatccgggtgcacccacgacaagccaggcccttgcaccagagtgggctccagtcccggcccgagccggcgggcgtgcgagaacgaccagatggtgccgggcatgaagcgggccgacgaggaataggtggtggaggtggaggtggaggacgacgagaggctggccgcggagggcgcgagggggccggccggggagcgcgcgggcgagcccagcacgcgcgccgaagggctgcagacagcggccggccgggcgcccagctgcagccccaggggccggatggggctgacgaagccggtctgcactgcctggtcgcgacgacccaggccccgccggccctgcttaccctcctccagcgcttgctgcagttgcttctccaacagccggttccggcgctccagctcatgcaccttggccaggaagcagcggaaccggaggttcagggtcttgagcacgttgatgttggagcccaggtcattgcggagggccatggcggcaggcggggccgggcccggcccgggcggcgagtaggcagcagggccggccggcgagagaggcgccgggggcaagtctcctcccccggcgaagtggtcgcctcccagtgagtcccccagtggcccggccaggccctgctgctcctgctgcaggaggaagaggttggggccgaataacggattcatggctgcgccttctgctgggagatgcagaccggtgcaggagcagggatggaaggcgagccagaagagccaatgcggcgccggcgggacagagccgaccaatcaggcggctcggcagcggggcagaggtcagggggcgggccgaggggaagccaatgacaggctccaattggaggccggaccctggacctttccgggtctgaggccgagccctgtgatgaggggagccaccgcctggactccagccggggtggcgtaaagcccaggacctccagtaccccatgggttctggtggcaagcccatctcccctacacgactttttttttttttgagaccgagtctcactgtcgcccgggctggagtgcagtggcgcgatcttggctcactgcaacctcagcctcccaggttcaagcgattctcctgcttcagtctcccgagtagctgggattacaggcacccgccaccacacccggctgattttttgtatttttagtagagacgaggtttcgccatgttagccaggctggtctcgaacacctgacctcaggtgatccacccgccttggcctcccagaaagtgctgggattacaggcatgagctagtgtgccccgccttcccctacacttctattgccctcctctccccggagttcaatcacccctagctctgactccagggctttcccttcctgggaaaacccaaggatgcaggagcctaaaactgaccttatttctcagtagcacccaaccattccctctcctcagaagatcccagtcccacctcccatctttacccttaaagcggcaaaggcagcacccagttccctcaaaaatactcagtggccagaggttttaaaatgtgtattaaatttcatgggtatgcacagtagagaaggcatcctcacagaggcaagagttccaacctggtgacaatggcagtgagccacccgtctagttttcaaccatctaagatagcagcagctggctgttgcccctggactgagatttcttcctctttgctggtggggggcggctggaacggatgggagacacagtgggaggctgaggccccttgggggtatcattctgtttctggaaggcagctttctcaaaaggctgctctggcaactgctgcttctcaacccccttggcccttccaaggggctgatgatggtccttaggtttcagggtggcctgagtcttggatggggataacacagccggtgtttgtgtgtctgtgcccttgggaggggcattctgcctgaggaaagcaactttcttggaggactgtaatttaggtgatcgttgctttagcttcccagtcacctttggctccctgatcccttcggcttttccagctggctgactgctatcctggaagctggaggaagcttgggtctttgtgacagaaggtacagtggacaattctgagtctgcccctttggagatgccattcagcttctggaaggaggccttcttgggatgttgctgtttctgcagctgctgctttgtctttgcagcccccttggctttcttggctggctggctgctgttctc

SEQ ID NO: 273 - DNA, 225385 bp, Homo sapiens
  source 1..225385: mol_type = genomic DNA
gcaggtacccgcgcggccaggcgcgcccgggacagcggcccgggcctccggggggcgccggaccgctggggggcgcggggccgcccgacgacgacgacgactcgcccgctctgctgcgcgacgaggcggcagccggctctcaggactcactgctggacagtggcggcggcggccggggccggggaggcggcgggcgctcggacccctcctgcgcctcagagcacgagatgcgtgtagtgtcgccggtcttcctgcagctgcccagctacgaggaggtcaagtatctgcccacctacgaggagtccatgcggctgcagcagctcagccccggggaggtcgtgctgccagtgtcggtgcttggccgccctcgaggcggggtcgccgcggagcccgacggcggcgagggccgctaccctcttatctgagcgctcggggatcggcggctggtgcagggctgggggctgcgggtggcaagcaacggccggggtgccgccgccaactgcctcagaccttatctggcaccctggcctaactgcccggcaccccgcgactgggttggggtcactcgtctccctcgcgttctcccgggatcttatgtttctctgcgtttcattccgttcaaagaaacgtggggcacgcgcggcgggtgcggctgcagcaggcgaccctccagcgcaccttcgaaggacgtccctgccctctgccttgcctcgtattgtggttcactagtaagtgcctgcttccctagtcaaagagaacacgtgagccctttggtgcgtcgagagaagggcggtcttctttagggctgaggagaaaggaccgcagttccactcctttccctacctgccgcctggacaggtctcccagggtgggcagagggcgaggagccgttgaggaccagccgcgaccagggactgctgcacgtgggtgtgggagagcgccacttggttatgatgaaatcgctgccatgcggcagaccccccaaaatccctcagtgtcttcctgatctagcaaatagtcacagctggtgtttcacaattaggtggagtgcggggagtgggctaggggggacacctgtgatacaaggttagctgctgtacctactcagggaacagcaaccatgtatatccattcggctggacttttgattgttcaataactgaggaggtatttatatttatttgtcttttattctaatatttttaccatgcattgaacgcaacaggagggtatttcagcaaattcacgacaaggtaatcgtcttatcactttttgtaggccattaatggtcaggaaattgcccatactctgtcattattgtttaataaatcattaaattatttcattaaaaaagaaaaacaggtatggtcaaacgaggaagcatatgtgacataaaaaacatgaaggatatcttattttcactatttgagaagaatatattttatttttagtactgtggcataatatataactttttataataataactgtatgcattatgtagtatagcttttaattgtatcattcatcacagttatatgtaaaaataattgacatgtatatgccataccatgaagcatatgatgttgtgcactttctcctccatttttcatttggaatacattccacaacatgatccaaaacataagaacttacgacttgtaactcgtttaaagccattaattgtgcagtaatgtgctacaggattcaatcagcttctcttaagaaacaagtgtcattgtatcagtttcctgttctgtgacacgccctttaaaagtaaaagataatataacatattttaatacattgtgtgtaatgtacatatgcatattgtctatgtactatatacacattgtttataatattgttattacagtttgtcattcacctgaaaggagaaggaaaagtacgaaaggtttctctgcttgggaaaaggtgaatgttgttatatcaagaacgattacacacatggatctcatacatgtttttagaacattgttcttctgattgaagaagtctgatgctcctgaaaaatcttaaaatatctgacttgtattgaagaaaattatttaattaaatttttaaaggctggttgaaaaagtctgacagttctgagaattttttaaatgtctgaattgtaataaaaaaatggtttactttaaacttctaaaaactaatgaccttgtgactaaagaaaaatcatttgaagtgtattaaaaaatagcaaaacattaaaatcttttctctgtgcaaattttatcagatgtgtggctatatggtagtgtatcaaaatatgaaatatgtctatttgtcatttaaagcaatttgagctgtgaattgacaaaagtatcaggagttgaggctatatcagttgagaatggtacaaaatttaattacattatatagataatcacatattaatgttactcaaataccgtgtatttttgttatatgtggctatcaatactactcaccattcaaacaaactggaaagttgccatattttaaaaaataatttattctttgaggttacactgttttacacagttcacaaatgttacctgtatctgaaacatcaacctaaatatccaaatacctgtgccagtatatgaagcatagtctatatgttgttaccataacatcttaaagaaattcaacaaaatcctatgaaaaatacttacaatacggatcaagtatatttctcttttatcaactatggaatatttctctccctaaaatctagaatgtttataaagtggtaattacacttgataccaatcacacaatgaggttctactgaattttaaaatgacaagttttcacctgttttttatctgcccaacccacaagcttttattcacatccctcagttcaatagaaatgagtttgactccacagtggggttttttttcttgcaatctattgatttaccaaggacaattttgttcaggcataattgtgtggaaaaattctttaaaacagtattttattaataaatgagcatgtctcatggtaatatatacacatataacacaccatattaacacacacagaacctgtgtgtttataacctgcattgcctggatagaaacatttttaaagcagtaaaggcagtatctgggtgttaagttttatagatttcacttggaaattattatatagacagaacctattatatataattgcatgtgtttattaatatagaaaatagttatcctgttacctgaaaaaaactcacaaagaaatgattttacttctttttaatattctgtagtaaaagtggaggatagaacattgtgctctttatatgtagaataatacactattaacttatggcatgacatgttaatggaattaagatggaacataaattttatggtatatatatatcttctttttttttttttttttgagaaaagatctcactttgttgcccaggctgaattgcagtggcatgatcaccgctcactgcagccttgaccttctgggctcaagggatcctgctgcctcagcctcctgcatggctgggactacaggtgcacaccaccacacccagctaatttttgtatttttttgtagagatggggtttcgtcatgttgcccaggctggtctcattctcctgggctcaagtgatctgcctgccttggcctcccaaagctctgggattataggcgtgagccaccatgcccagcctgtggcatatatatcttaactaaacccacctgggcgtgcagtgttttccagtaccaagtgagcttttgctcctggttttcagttatcaaagtaattcgaatactaaaacattttaagcacattttattttcactgacttctcaagagtagggaaataatggtcctgcatattgtaatccatctggaatgcaaaaaacatgattgattttctaaatttaggtgctagatatataaatatgtatattgtgtatgtacagttggttctcctgtatctgtgggttctgcatctgcagatgcaaccaactgcaggtagaaaatgtatttttttaattttttgaaaatatttttaagaaagaaaatataacatttaaaactgcaaattaatacgttatagcaactatttacataacatttatattgtattaagtgttataagtcatctagaggcgatgtaaagtatatgggatgatatgcataggttatatgcaaatactacaccactttatatcagggagctgattttgacctttgcagggggtcctaaaaccaatctctatggatacctagggatgactgtagtgtgtgtgtgtgtgtgtgtgtgtgtgtgtaatcaccagttgattacaagcaatttgttatgggtgttcaatatcataaccaaggggaaaatgtcttcttgagatagaatgatagttttaagaggccattaattgctacattctgcaaatgtgagtatgcttcaaccatggaaaatgggcattggcaattatgtcaaagggcatgaaatgtactctataaggaaaacaagattcaattgtaaaggccagagggaatattaaggaaacggactcagttaacaatttgaaaggcaatatgctaagtaccttaatgttgtactttttgtatacagtttctctcaagtggaattaataaaggaaacaattcaaagctgaaactcatataaacatgaatatgatgtctagatttatacaatattctgatctgacttttattaaaaattttatgaattgtaattaatttgggtttccagcttgagagaaataatgatgtatgttgagttttattttgagcaacaaacattaaccatctcttcaaaagtgtaagtttcctaaaccaatcaatagtagaatatttggcaagttcatatctgacctcagtagtttacaatttactttttcattctcctttcatgcattgatgaaaagactaataactaagggtaactaataactaaggataaactaagggaaggtattttgtcaaccaaggaatgaatcagcaacagctaatggcaaaaacttaagccattctttcttccacatgggtaataccagaaaagttacagtattcctttgtaaaattttgcctgtaaaaataatcaaatatcaagtaaaaccaatacttttgtcatacttaattacatgtagaacctaattttattattcatttattcatttttatttacagaactcactttttaaatttatttatttatttatttatttatttgagacaatatcttgcttgctctatcacccacgctggagtgcagtggtgtgatcacagctcactgcggcctcaacctcccaggctcaagtgatcctccctcctcagcttcctagtagctggatacaggagtacaccaccatgcctggctaatttttaactttttttgttgagacaaggtctcactatgctgcccaggctggtttcgaactcgtgggctcaagaaatcctcccacctcagcatttgaaaatgctgggattgcaggcatgagccaccacacccagcccacttttattaattttatggcaaaaattatatgatggtggagatacttatgtttgtcgccaaaccaaacagtatttttatcccctcttcagcttcttagctaagtatcttgtctgatatcttgccgttcttactttctttttgtgtggttgttcttatcctgcttgtcacatctcttagaactccatgttattctgctgtgctttcatctctctctggtatggcttcaccttttgcacagtttcttcttttggtaaaatggtattttccaacgtacttcctttgttttctctttgcatccgacttctgtagcttttccatgttgatccaggcatggtttttcctctttatccactaaaggactgtaaactttttttatttgttattatctatggagtttttctctgtgatgccggacaaacaaatcttttcatgtgtccagcaaggattgttctaaatctcaaatgtaatagatccagatgtactactacctctttatcttctgctttctcacctggattttcctgaagggattatcagcacttttctccccatctttccccaaagacgtgttctctgctatattaggacaaataattagacccttgcattttagtaatgacagggatcttattttggcttccaaacctcaagcatattctttcttcatggactattacatctttctactcgatttttttctcacaggcatcactgtggtatcctctatgtgtgtcactttttgtgagtaatgatcacctgttttcttactatccttgctcacagacattctatttgttgtactagttaaaagatcatatcctctatctttgtaggaaagacctcatttgagtcactggacctcaaaggtaacttgatttacaattgattgctctatcttttataacattcttacgggttttttgcatgggctcctcttaaacttcctctgcatatggtatctcttttactgggtagactagaaaatatctctacctttacatttcttttattcctgcttgcagatataatcttgaagttatgcctcgaatccccactgtattaggaccttatctgaagaactatcaatagttttattttctgcctctttgttgcctaagttagtttcatcagacagaggattagaaccttccagattactcctgtttcattttggtttgtgtgaagtttttcttctgtattgaccaaagataccaccggataaaaattaattttgattatttttctaagtcttaaaaatatcttctttccatttgtagatttaaatttttattgcaaattcttcattagtttgtcattcttttccatgtgtataatccctgttgaactagccaaaccatcagattcctgaagatttataccagttttacgttctcccatctcactaaccccctccgcacccccccaccccccactatgttacactcactgtcttttgtttcatagctccatgttctgagtttttctcttagaaactcttcacaatattctttttttgttttttgaaacagaatctcgctctgttgcccaggctggagtgcagtggcactatctcggctcactgcaacctccgcctcccgagctcaagtgattctcctgcctcagcctcctgagtagctgggactacaagcatgcaccaccacacctggctaatatttgtatttttagtagagatggggttttaccatgctggccaggccggtcttgaactccttacctcaagtgatctgcccgccatggcctcccaaggtgctgggattacaggcgtgagccaccacgcctggcatcttcacaatattcttttaaactttatttacttgaatcttttctgttgatgtaagcaactgagactcttgcagtttttatcagttctgtatttgggtctaggatgtggggacattctctgactcagcgtttttgaaaattaagcttatggccaggcacagtggtgcacgcctgtaatccaagcactttgggaggttgaggcagatgtatcacctgaagtcaggagttcaagaccagcctgaccaatatggtgaaaccctgtctctactaaaaatatgggcatggtggtggttgcctgtaatcccagctactcgagaggctgaggctggagaatcacttgaacccaggaggtggaggttgcagtgagtggagtttgcaccattgcattccagcctgtgtgacagagcaagactctgtctcaaaaaaaataaaaaagcttatattcctttatattaatttctctttgcacatatctgtttggctaggcaaaggttttagattcttgaaaatctttattttttagggtagatctggttctttgactagctcaatcttgcatgttctttggccatgtctccagtttcagaagcattagttttagattcatattaacaaggattacaaaagaagttttcttgacagatctcctggtcgattcttatttttgttcattggatcaaacatttcttcaaatccattatatacttccaaacgatgttttcgtttgggttctgtcataagtgttttcattccaataagtcttcaactgcactgttcttttttcttgatggtttcaataagttactgataactcttgcttgcgtcaatgttttcttttggtgttttaaaaagttccatatgattgtaatcataattggttcatcgcctgatgcacaagggagttaatatgcagagacacctggttgcagcagagaaagaggtttaatcatagggccaccaaacagaagaggagatgagagaaaacctcaaatctgtctccctgaggattttggttttggagtgggccaaagtgttgagctcgttgattggtcagagtacaaaggtgtggtcatggggcagcatcagtattcttatgctcatttgggtcctctgtggtggtcttcaaactggttgtctcagctgtacttctggaatttaggatctgctgaagcaattcttaaacaagagttttatcatttaaagatcagaagtcctatttatggaaagaatggggatgcaactggttagtatctagtgccaccctgacttttgattacaaggaagtgggccaaagtacagcctgattaatgcttaattgtagctgtatatctgtccagaattcttgttaacgctgtaaggagggcttcatggtcagttgactaaccttaaaaaaagttttgtatggtcttccacatcttcttttgattgaaaacttgtacaatcaaatttgaactctaaataaaatctctgtatgttctatatatttttttctagtgcttggctttcttgagtagtattttttttttccagacagagtctcttgtcacatgagctggagtgcagtggtgcgatctcggctcactgcaacttccacctcccaggttcaagcaattctcctgcctcagcctcacaaggagctgggattacaggtgcatgccaccatgcctggctaagttttgtatttttagtagagacggagtttctccatgttggccagtctggtctcgaactcctgacctcaagtgatcctcctacctcagtctcccaaagcggtaggcttataggtatgagccactgtgcccggccattgagtagtatttttcatattttttattataggtgttttagccaactggttttctagttctgtctaatatagttgaatgcgtactaagggtttcctatgagcaagctttttagaatttggagtttctaagattctataagcattggaatgtctgccagatcttctactagatataccttagaaattttcaaaagtgtcttgatgcctgtaaaattttctaccgattcacatctccacaaaagagttgtcatgaggttcttgacacttgtcaaatcttggtcaggtgcagtggctcacatctgtgataccagcacttttggaggccaaggcaggtggttcgagacctggccttgaggccaggcattcaagaccagcctgggcaacatggtgaaaccccatctctactaaaaatacaaaaattagccagtgtaatggtgcacacctgtaatcccaggtactcaggaggatgaggcatgagaatctctcgaacccagaaagcggaggttacagtgaaccaagacagcaccagtgcactccagcctgagcgacaaagtgagactgtctcaagaaagaaaaaaaaaatattctccttgttttcttttttttttctagtggaaacagaatccaactgggctttattttacttttattccttttacaaatatttcttgagaacatactaagttcaagtcaccgttttcatctttttcatttttttacattttagttgacatataataattgtacatatttatgagatacatagtgatgttatgatacctataatgtgtggtgaccagaccagggtaattagcagatcatcatctcaaacatttatcatttgtttgtgttggggacattcagtatcctccttctagctatttgaaactatttatttctgtgtgtgtgtgtgtgtgtgtgtgtgtgtgtgtgtgtgtgtgtcttgctatgttgctcaggctagtctccaactcctttactcaagtgatcctccaaccttggcctcccgaagtgctgggattacagacgtcaacgactgcgccggcctttatttctttaggagttttggtctattggtgcctgtcaggtcttccatgggttcaatctttttcacagaagttcttagaaatttcttgattgttgtaagaagtccagctgattcgcactgagccctgggtactgtcccaagtttcttgttgattgtcctctgggttggcaattggctgtggagttttcccaaggcccttggtttctgttgggtcttccgccagttctggcttttctttaggtatcctaaacaatctcttgctccctgtgaggtttcaccatttccacttggcagatctggggttcttgttgctttcactctctagctgtgctgtctgctttggcattttcataagccctttgatgcctgtcaggttttcttcctgactgcattttccccagtcatccccagcagtctcctgggtttgtgctttgaagtgttcctaaactttctgttgacatcatcaacatttatttgttcctctagttctttcggtgtttacaggagctctctgatagctgccagtcttctgtgggttttggttttattttaagtgtcctggcattttcatgagaattcttagagtttccgctggttctgttttgtgctttggagtgctcataagatttctatgggtgtttcaccacttaatttgttcctctggttctttcagtgattgtgggtgctctctgatacctgccaggtcttccacagcttttgccttttcttcagctcttttcatcagtctcttgaggaatgttagagtttctatgggttccctattatgctttgcagtgctcctaagatttttatggctacctattttagtaaacatctgtaatcagttgtaattagtaatttcattagtgaattcctgaaatttatagttgctgagtttgaactctggcaattcactttgataagttaaatatcattatttctagcttgctctgatttaacattcggtagcatttacattttagcctttcttccaaaaaataaaatataggcattcatccaactttagatataagctcaacatttgctgtgagggtgacacttttcatttctatcatgatgactataacaaaaataactataattcactgaatgaagacatatgtcaggcactgttctaggcactttacatgtattatttcacttaaaattcacaacaggaggaagtgaggattattaaccccattttacagatgagaaaagtagggccccaagaggttgagtaatgtgcccaaagtcacacgactgataggtagaagatccaggaagctgatccagcctgttttactccagagctgctgttctcaaccactcaatgtctcaacacacaattaatttaaccttgcagaatatatatatatatatatattttttttttttttttttttttcctgagagtcttactcttttgcctaggctggagtggagtagcacaatcaaggctcactgcagcctcaacccccccaacccctggggctcaagtgatcctcccatctcagcctcccaagtagctgggactataggtgtgtgccaccacatccagctaatttttggattttttgtagagacagagtttcaccatgttgcccaggctggagtcttgaactcctgagctcaagcaatctgcctgcctcggcctcctaaagtgctgggattataggcatggtggctgtaatttgctgtttaaagaaaccactgttaaaaacaccttaggatctgtgctgggaatctgtaataatgactcaaaattatttgtaggcatgtagaaatgtttaatggataacatggatacaatctgaaatgtttgacaaaaaactactcagatactggtttggtttttttgtttgtgtttttcatttttccatttcattcggctaatgggccgttagtaccaagcgtgcctccttcccagtctggcttagttaactttaaaaattgaaaaccatttctttaaaatagctggtaaatcttttccaatattttaaaaaagaaacatcaggggatttgtatgctcagcataaaaatgagaaccatagagtctaacatatcactaaatacccaatggtagctaatatcagagcaaggacaaaaatagcacattcttaaattaaggttctgtttatatttttgtggtagaatatgaatgttaagacttcatataggctgagtgtggtggtttatgcctataatctagcactttgggaggccaaggcaaggactgcttgagcctaggagttcaagaccagcctgggcaacaaagtgagaccccacctctgtgaaaaatacaaaaattagccgagtgtggtgatgcacacctgtagtcctaactattcaggaggatgaggtgggaggatcaccggagcgcaggagatcgaggcagcagtgagctatgatcatgctactgtattccagcctgggcaacagaaggagactctgtcaaaaaaaaataaacaaacaaacaagaacttcatatacatagtggtttagagttgggctgtggagtatgcagagtctgcctgcctaggtaaatctctggtctctagatttactagttatgtgaccgtaagccacataacttgttcctttgtgcctggaacatcagaatgtatttccagtgccattgtacacatactggttgacactgcattcttggtgtgaaattcaaatctctttgtggaaattccaaaacttttctaattagtcctggacattaatgatttgaattaagaagaatagaaacacatttatgtaaaacaaaatataattaacttcacttaaaaaagcctacaaaatgatcttcatgactgattttggttgaagtgacacactgagtttaagattgggtcagaaaacagaaataatagggttggggcaggcaaggaaggactagatgtgacacactaaatgagactggaggggttgagtgtggacaccttgctgttgagaagccagtgtagtgggcgaatggtaagaagagccagagagattggccatgggagtcagactggcatactgggtcttgaggccacagaagttgtggcaggcagggaggtgcaaaacctgaaagccctgcttgttttcccagtggggtggcctggagcctggggcgggtcctcagccctgctcacctcctgtctggaaataaactcagtgctattggaggggcatgttgggagtgagatgggcctttcgggctgcatgggagctgggtgaggcctgtaactgctggctttctctcaccttcctggtgacctgcatgacacagcagacgcagccataatccccctgggaacataactccattggcctgagaaccagacctccatccaccacagcagccgaagcaagccctgcccaaggagagtctgagctcagacacgcctatccctaccccgacctgatggactttctctactggccctggtagctgaaggcaaaggacataatctcttggtagccctatggacccacccactgcctgagaaacttatccaggtgaccttaggacaagcttgtatcctccctatactactgtagctgatgctctttatttatttatttatttatttatttattttgagatggagtctcgctgtgtcacccaggctagagtgcagtggcacgatctcagctcactgcaagctccaccccctgggttcacaccattctcctgcctcagcctcctgagtagctgggaatacaggcacctgccaccacgcctgactaatttatttttttttggtatttttagtagagacggggtttcaccatgttagccaggatggtctctatctcctgaccttgtgatctacccgcctcggcctcccaaagtgcttggattacaggcgtgagccactgtgcccggccgctgatgctctcttgaaagcaccacctcctggctagaggccaaccaacacaaaactagcgcaataaacaacaacacaacaaaggaccctcacagagtccacttcactctcctgctacctccactggagctggtgctggtatccaaggctgagagacctgaagatggatcacatcacaagacgctttgcagagactcctcagtaccatgccagaacctggtagctctgctgggcagctagatacagaagagaattaacaatcactgtagtttggctctcaggaagcctcttctctgagcactcacatcctctgagcacgggagcaccgtgtgggacgaaagaatctgaacagcagcccttgagccccagatcttccctctgacagagtctacccaaatgagaaggaaccagaaaaacaattctggtaatatgacaaaacaaggttctttaacacccccaaaagatcacactagctcaccagcaatggatccaaactgagaagaaatctctgaattgccagaaaaagaattcaaaaggtcaagtattaagctactcaaggaggcaccagaaaaaggtgaatatcaactcaaagaaattttttaaatgctataggatatggatggaaaaatctccagaggaatagagagtgttataaataaagtttcagtgcctcaaaagaaatagcactcgaatataaaattttctttttctcagcaaggcaaggtgcttctatagaagggtgcgcccttacagatggagcaatgatgagcacacacttggacaagggaggggaaggagttcttatccctgaagcacgtggcctctgctgctgtgttgtccccctattggctagggttagactgcacaggctaaactaattctgataggctaatttaaagagagtgacggggtgagtggtttggcgggaaaaatggttatgcagcctggagaatgagtcaggacgcagcaggtagcaggtaattggaatgagtcagggtggagcaggtgattgaaatgagtcaggatggagcaggtaatcgaaaaagattgctttatgaggaagttaagtttaaaagtagaaggcaaagaattgaacatactgacatattgattctttgaaaagaaatttagaactcatatctaacaagcataaataaaaaacaatcacaacttctagaatgaaggagacatttagaaaaatgcaaaatgcggtagaaaatctcagcaatagaatcaaacaggtagaagaaagaacttcagagcttgaagacaaggctttcaaattaacccaattcaacaaaggcaaagaaaaaagaatttaaaaaacaaacaaagcctccaagaaatttgggattatgttaaatgaccaaatctaagaataattggtgttcctgaggaagaagagaaatctaaaagtttggaaaacatatttgagggaataattgaggaaaatttccttggccttgctagagaactagacgtccaaatacaagaagttgaaagaacacctgggaaattcatcacagaaagatcatcatgtaggcacacagtcataaggttatctagagtcaaaatgaagtaaataattttaaaagctgtggaggcaaaagcaccaggtaacctatacaggaaaacctatcagattaacagcagatttctcaacagaaaccctacaagctcgaagggatgggggttctgtctttaggctccttaaacaaaacgattatcagccaagagttttgtatccggtgaaactaagcctcataaatgaaggaaagatacagtctttttcaaacaaacaaatgctgagagaatatgccactaccaagccaacagtataagaactactaaaagcagctctaagtcttgaaacaaattcctcaagacacaccaaaatagaacctccttaaagcataagtctgacaggacctataaaacaacacgatgtaaaagaaaaaagttatttaggcaacaaatagcatgatgaacagaacagtacttcacatctcaatactaacattgaaagtaaatgacctaaatgctccacttaaaagacacagaatggcagaatgggtaagaattcaccaaccaagtttctcctgtcttcaagagactcacctaacataaggactcacataaacttaaggtaaaggggtggagaaagatattccatgtgaatggacaccaaaagtgagctggagtagcttttcttatgtcagacaaaacaaactttaaagcaacagcagttaaaaaagacaaagagggtcattatataatgataaaaaggacttgtccaacaggaaaatatcacaatcctaaatatatatgcacctaacattggagctcccaaatttataaaacaattactactagacctaagaaatgagatagacagcaacacaataataatgggggaattcaatactccactgacagcactagacaggtcatcaaggcagaaagtcagcaaagaaaaaatgaacttaaactataccctacaacaaatggactttgcagatatttacagaatattctacccaacaactgtagaatatacattctattcatcaacacatggaactttctccaagacagaccatatgatagacaacaaaacaagtctcaacaaatttaagaaaattgaaattatatcaagtactctctcagaccacagtgaaaaaaaattggaaatcaactccaaaaggaatcctcaaaaccatgcaaatacatggaaattaaataacctgctcttgaatgatcattgggtcaacaatgaaatcaagatggaaattaaaaaattatttgaactgaacaataatagtgacacaacttatcaaacctttgctctgggatacagcaaaggtggtgctaacagaaaagtttatagccttaaatggctgcatcaaaaagtctgaaagcgcacaaatagacaatctaaggtcacacctcaaggaattaaatgatagcaaaccaaacccaaatccagcagaagaaaagaaaataacaaagatcagagcagagctaaatgaaattgaaacagacaaacaaaaatacagaagacaaatgaaacaaaacctggctctttgaaaagataaataaaatcgatagaccaagaaaaaaagattaacctagaaaagagagaagatccaagtaagctcaattagaaatgcaaagggagatattacaaccaatacaatggaaatacaaaagatcattcaaggctactatatatacctttatgcgcataaactagaaaacctagaagagatggataaattcctggaaataagcaagccttctagaataaaccaggaagaaatagaaactctgaacagaccaataacaagcagcgagattgaaatggtaattttaaaattgccaacaaaaaaagtccaggaccagacagattcacagctgaatcatatcagactttcaaagaattggggccgggcgcggtggcccacgcctgtaatctcagcactttgggaggctgaggtgggtggatcacttgaggtcaggcgttcaagaccagcctggccaacatggcgaaaccctatctctattaaaagtacaaaaattagccaggcatggtggcatgcgcctgtaatcccagctacttgggcggctgagacaggagaatcgcttgaacccaggaggcagaagttgcagtgagccaagatcgcgccactgcactccagcctgggcaacagagccagactacatctaaaaaaaagaagaagaagaagaattggtaccaatcgtattaacacaattctacaggatagagaaagagggaatcctccctaaatcattctatgaagccagtatcaccataatgcaaaaaccaggaaaggacataacaaaaaaaaagaaaaaagaaaagaaaactacagacacaaaaattctcaacaaaatactagctaaccaaatctgacagcgtatcaaaaagataatccaccataatcaagtgggtttcataccagggatgcagggataatttaacatatgcaagttagtaaatgtgatacaccacataaacagaattaaaaacaaaaatcacatgatcatctcaatagatgcagaaaaagcatttgacaaaatccagcatccctttatgattaaaaccctcagcaaaatcagcacaaaacagacataccttaatgtaataaaagccatctatctatgacaagcccttagccaacattgtattgaatggggaaaagttgagagcattccccctgagaactggaacaagacaaggatgcccactttcatcacttttattcaacatagtattggaagtcctaaccatagcaatcagacaagagaaggaaataaagggcatccaaatcagtaaagaggaagtcaaagtgttgctgtttgttgatgttatgattacatggctagaaaaccctaaagactcatccaaaaagctcctagatatgataaatgaattcagcaaagtttcaggatgcaacgttaatgtacacaaatcagtagcactgctgtgcaccgacagtaaccaatctgagaatcaaatcaagaacacaaccccatttacaattgctgcaaaaaaataaaataaaatacttagggatatacctaaccaaggaggtgaaagacctctacaagaaaactacaaaacactgctaaaagaaatcagagatgacacaaacaaatggaaacactttccatgttcatagatgggtagactcaatattttgaaaatgaccatactgccaaaagcaatctacaaattcaatgcaattcccatcaaaataccaccatcactcttcacagaactagaaaaaaacaatcataaatttcatatggatccaaaaaggaccccacatggccaagcaagactaagcaaaaagaataaatctggagtcatcacattgcttgacttcaaactacaccataaggccatagtcaccaaaagagcatggtactgatataaaaataggcacatagaacaatgaaacaaaatagacaacccagaaataaagccaaatacttacagccaactgaaagcaaacaaaaaccaaaagtagggaatggacaccctattcaacaaatggtgctgggataaccaggaagccacatgtagaagaaggaaactggatcctcatctctcacctatacaaaaattaactcaagatgtattggggtgatcagacccaacaccaggccataggggcgacgaagtctggcagagtcaaaggattgagaaaaagacggtttgagaaggaaagtgggaccagggggccatcgggattgtggaggctgtggaggctgcggaggctgcggaggctgcggaggctgcgaaggccccgatctctgggagcccatgctatttattggtaattcaacaaagaaacaggtggtgagaatgtgggggtcaaaagggcaggcgcatggtctacagctgttcttggtttagcatttatatggaacaagttctgctacttgagataatgggaatacaattgatctaagagcgtaggagggctagaagcaaggagccagccagtctagacacattccagaggacattatgtcagacacacaagccctgcctcagtttttttccccaacactcagctttttcccaacaaagatggatcaaggacttaaatcatatctcaagacctgaaaccataagaattctagaagataacatcggaaaaacccttctagagattggcttaggcaaagatttcatgaccaagaacccaaaagcaaatgcaacaaaaataaagataaatagatgagacttaattaaactaaaaggcttctgcaaagcaaatgaaacaatcagcaaacagacaatcctcagagtgagagaaaattttcacaatctatacatctggcaaaggactaatatccaaaatctacaaggaactcaaacaagtcaacaagaaaaaaacaaaccaccccatcaaaaactggtttaaggacatgaatagacaattctcaaaataagatatataaatggccaacaaacatgaaaaaaatgcttaacatcacctatgatcagatgtggttcaaaaccacaatgcgataccacctcactcctacaagaatggccaaaaaaaaaaagatgttggagtgaatgtggtgaaaagggaacatttttacactgctggtgggaatgtaaactagtacagccactatgggaaacagtgtggagattccttaaagtactaaaagtagttctaccatttgatctagcaacccaaactgggtatctacccagaggaaaagaagacatgatatgaaaaagatacttgcatactcatgcttatagcagcagaattcacaattgtaaaaatatggaaccagcctaaatgcccattaatcaacaaatggataaagaaaatgttttatatatatatatatatattttatatatatatacacacacatatatatctatacacacacacacatatatatatgtgtatatatatatatatatatatatatatacatctccatggtatgtatggtattccatggtgtatatatatgtacatatatatacacatatatatacacacatatatataatatataaactctcaaaaaaaaagaagaaaggaaaaaagatctattactcaataacttgtgtgaaaatgttcataacacctttacttataacagcccaagcaaaagtagataccacccaaatgtctaccaagtgatgaatggataaataaactgtggcatataaatatggtggaatattattcagcaataaaagaaagaactgatacatgctacatggataaacctcgaaaacattgtgctaagtgtaagaggccagttacaaaagaccacacattgtataattccatttaaattaaatgcccaggaggggaaaatctgtaaagagaggaagttgattagtagtttcctagggctgggtgggggataggggaggagacgaggattcactgctaatgggtacagggttttttggggtttttttgtgtaatagaaatgtccaaaattgattaaaaatatttttaataaaaataaaattacaaaagtgatatttaaacacacattggagaaaattcagtcttaaaatctgtcctttatctcactacactgagatactccaatgaactataaccttccagtcttttttgtttacattttcaactcaagtaataacatatatatcttcctttaaaaagaaggaaggaaagaaagaagagaacattacaacaaagtcctctctactaccttggtcctcaatcgctgcctactcctctaaattgagatttaaccaatgtttggtaagtatatttccagaattttctctgcatatttttgcttcacgtggatgtacccagagtaaatgtatagtactgttttgcacctaaggtttttatttatgtgcaatgtaatcatttggtagcttcatgtaaccatcaccacaatcaagacacagaactgttctatcatcacagggctttctggtgctaccttttagccttagagccacatccattctccctctcaccacttcttaacttctggcaaccactaatctgttttccatcttactattttttctttcaagaatgttatataaatggactcatacagtgtataaccttttgagattgcctttctcacttggaataattccctagagatccacctaggttgttgtgccggttgttttctttttactactgaatagtgttccatgatatagatgtaccatagtttgttgaagcattcactcattgaaagatacttgagttgctttcagttcttggctattaagagttgagctactacaaacatttgcatacagctttttacttgaacataagtttccatttctctgggataaatgcccaagagtgcaattgtttggtcatatggtaagtgcatgtatagttttgtaagagactgtcatatttgtttccataatggctatggcatttttatattcccaccagtaaaatgtaagtgatccagtttctctgcgtccttgccagcatttgttatcactggttatttcagtcattctgattggcatggttttaatttgcatttccctaattgctaagctatggagcttcttttcatgtgtgtatttgccatctgtatattctctgtggtgaaatgtctgttcatgtcccttgaccattttcttattggattgcttatttgttttttattattaagatttgatagttcttggtaagttctacatgcaggtcctttgtcgaataggtggtccacatattttctcccatcttttttttaaggtcagtgtttatttttattgaagttatacatgcacatatttaagtaggcaaatacttctataaggtttgttgtgaaaaacagtagtactggatccgttcttctcaaccttcccctctgcagaaacaatcactttcagctcttttagttggctcttttggtatttaccttaatgcatctattaataaataacatgcttattatttaccaatggtgggggaacagtatctattgtctctccactatgaaaaatgaagatttagccttttttacccttcctttcatcccaagcccatgtatatatccgaattttcactccaattcctccaaaacaaatctataatctcatattcacaacttaagaattgcaaatttatgaactacaaaaagttttttcataactgacccaatctgaactcatttggcagcaaaacctgaagaaaagctagaaaacttgaaaagaagctactatctttatttataccacttaatgtaaatattcgtgtgttacacggcagaaatactgatgtgtttagggaatgatcgctgcgaccctgctggggatgttctgtaacaaacgcatagtgttatcaagaactttggaatacacaccatttttcttaaacagatttgaattctgaaacagatttgacccaggggttttatatgtgggattgtggacctgaatagtaattatttggttatataaatattcagtgtttagttattatgactattaaatagaatctattcacaagcaagtcatgttatgatgatgatcattaatgtcaaaaccatacagaattatttttatagattagcacatttaaattacagaggaataacataagctcctctaataggaatttatttgatgtttttcctgtgtgtttttttgcagaagtttaaattgagcaccacttctttggggtgtttgtgcaaatctcatcttctcagtgacaccttcccattacaccctatttattgatttatttttaatgttgattattttattaatattgttattattagcattacctattcttttttcgactttatttttaaattaaaaaaaattcaatagcttttggatacaagtggtttttgtataattgtataattggtgaagtctgagattttattttatttttgttttgttttgttttgtttgtttgttttttgttttttggagacggagtctcgctctgtcatgcccaggctggagtgcagtggcaccatctcggctcactgcaacctctgcctcccggattcaagtgattctcctgtctcagccttccaagtaggtgggattacaggcgcccgccaccatgcccggctaatttttgtatttttagtagagatatcgtttcaccatgttggccaggctcgaacttctgacctcaggcaatccgcatgcctcggcctcccaaagtgctgggattacaggcatgagccactgcgcccagcggacgtctgagatttagttcgcccatcatctgactactgtacattgtacttagtaagtagcttttttcctcagccatgttccaccctccccttcctgagtctccagagtccattatatcactctgtatgcctttgcacagtacaccctgtttaaaatgacattcccccatcatcttcctatctccttcttgtgctgtctctgtttattaattctgaaatactatattttaaaatgtttgtttatagtatgtcttctccccatacatactcattaaaatgtaagcaggaatatttctttcttctcactactgtttctttatcacctagaacagttcccaggccacagtaggtgctcaatagtgacttggttaataaatggattttgctatttgcggtgtaggtattcatcaagaatgaggaaagatcctttattcattgaaaacaagtgccaaaaaaagggattttgtcaacttttaattataaatgcttcattattataactacttttctgataattttgactgattaatattaagtagacttagaagataaaaaatttcattgcatagcagctactatctcatattgtcttttaaattaaggacaaattgattatagtcctgaacctattaatataatccttttaaaattatgttttgtgcattttgttgttcatatttgtatctaccttaaaaacacagaaaatgaagagacactaatattatgttaatggtgtatattgaaagacagggcaagaaacattggaaaattagccatagattctactattattttaattctccagcacagtacaaatattacttaatccctactctatgaaattacatcctagcatttaatgctaatcacttggagggtcttggcttacaaactctattgatgttttatagaagtaaacattatttgtttactcatttactggctaaatgagtagccttctggtacagcccttgacttgaagacaagaaaatacactttaggtagatattttattgcttcttgactgagtcgttttaaactctctattttggcgataatactctcaaaatgaaaaggagcttagagccactactttatactcaacttactaggaaaataatttgtcataatcatttccatggaattaaaatgttttttcaattaaaagtacaaaaaattttaatgtgaaagtttcttcaccatagaagattattagagtaaaaaagagttttagataatctagaacatctggaactgcctgaaagcatgaattgctctgaattgtttcaaaatggttgttttgaagtggtctgttttagaaattactacatttaaaaatttatgcatagtgcatgctgagtgtatgatcccctgggttgcaaatggccaggcagtgatattccagcagctcaagccaattcacagggacagagtaactttaaagtaaagcagacagaatttttaaaaattgactttgttagagactgtaaaaggttgggagaacctcataaattttctggcccagagatcatttaccactgagcagaagacactgaagatatacaagctaaggacaagaagatgatgagtctttccaaaagagctgctgcgtgtccttctttggtttccagatggttctaaaagaaatcctgacaagtgattttcacaaaatcctacccacaaattaacaaggagttcttggtaaataacatgaatccatacattgttattgctgcatattacctcttaatgctatgtacattgtaaattctgaattttgtcagtataaggattaataaggaaaacgtatttgaggtatttctccaaacaggatttatgtagcatgcttcattttcagaaaggtatatattttctatatgtacaaaatgacagacatttgaagactttcttcaatagggacacatggaaatattttattatagtaaaccatttcctaaggtatatttgctttacaacttgtttaaaatttaggttccatattatataccataccctctataccaaaacatttttttggatcatcatatttcagaaatatcattagtttgtaacagggtcaggtcctaagcattctggataaacaatcttctctgtttgatatgtttatgaaatatacgaaatgtttatacctacatacaaaagcactaagttgtatcaaacccttctaaaatgtaaaaaaaaaaaattggctttaaaccaactgaaaaccttctacaatagatactttttaaagcataagacaaaagcacatacaagtgcaacattggatatgactgagggagtgacttccgtcactgattcacagaaactcggcttgggaacagaaagaatgaatgggtgggggatgaggaatctggtttcttgatgactatctaataactaatacctaatgagactgcactgtgctgcaatcagttaccaaaggtaaaaattatcagtggaatttagaaatggtggtagactcaactccaaaggaaggcgatcatttgaattataaaccaaaatgtatctgagacaggtctcaatcaatttagaaagtttattttgccaaggttaaggacgcccctgtgacacagcctcaggaggtccttacacgtgcctaaggtggtcagtgtacagcttgcttttacacattttagggagacatgagacacaatcaatatgtgtaagatgtacattggttccatcaggtaaggagggacagcttgaggcaggggctcccaggtcataagtagataagagaccaaaggttgcattattttgagtcctttgatcagccttccactgaatacacagtttagtcttgctcagtgaatctgcatttttacataaacgataggggagaaatatgggatttctgcaatcagatacgcatttgtctcaggtgagcctcagagggatgactttgagttgtcttttgtccacaaggaatttccttgtgggcaaattgtgagggaggtatgtagctttttctttttgcaactatcttacttaggaataaaatggaaggcaggtttgcctgacatagttcccaggttgacttttcccttggcttagtgattttggggtcccaagatttattttcctttcacaggggacataaagaaacacaaaataaaaagaaatatagtaaacatacaatcccttggctgtatctataatagctaaagttgagagtgaaagaaaatgctagggtggatgttgaccttgaaccaaactcagattttggtaagtctcagctatggccactagcctcaggcaacccccaaaaggaacaattatgctaggacaacagaaggtagctctggtcagctagagggtacttcatgttgtgggagggcaaacccataaaactactgaaatcagtaggtatagtgtgaaggagctgtttcatttcgtggatagttatcagcctcctgaagaatctttaccaaagtggactgtgagagtatctaatttaggggaagtacctttggttttgaatgctgcaatgcagaagattatgagattatgtttaggttgatacaggacccacagctcactatggaacaatcatagaaggttgtatgtgatccagacacacagcagggttattccagagggaagagctggcttggtggactggataaaagccactgtaaagagtgtatttaccttgagaaggactttctgattctctctataaatgtcaagtgaaatagcccagatgaagcagctgatatgctttgtatgcaaaccactgaaactggctttatgattatcagcatatttatctactgaatatggccattacccagtcatggtaaatgctgttattaaagggaccccttttgcaaaggcaccccatgtaaacttactcttacagaattcaacaacagagaaggcttattggattttctgtctctgctttttgatgtgggtcataaagatatcaagaacattaattaacaagacaatgagaagagacagcagaaacaaaggattcattccagcagggtggaaatttttagatggttattaagaaatgagatgaataaaatgggcactgatgggttgaaataaagatcttaatatagcactatagaaggtcgggtggaccaatgggaccccctctcctgggcctccaacattaaaaggactcctaaaagtctgctttatttatcccagtttggaggaatgtttttttttttgtttttttgttttttgtttttaatagagacagggtctcattatattgcccaggctggtctcaaactcctggcatcaagctatcctaccatcttgacctcccaaagtattgagattacaggcatgaggagactgaccttgtatggaaaatgctgtaaccctgttaaacttctttgtctctgcttttataaaggaaaccttaacttctccactttagagcactgaccccattcctttggaatctgtgttttccgggtggctatcctcgagcttttcaaactctatacttaatcttattttctaaatctaatgatttgagtttgacaacagtaaaacaagccaagtaaatccacccatcaagccatatttattggacaggataaatgaggatgaatgagattcccaaccccacacagtccataatagaagctggagtgttggtctggacaaactcttggtgtaatcaccctgcatagagcagagggcttctgcaaaagcccatgagtgcctcacagaaacaatgactggaccatttagatgttggactagagaattcccatttgaggggcaattaatagcttgctgtcagacattaattgaaactgcctctatgactgaaggacataaaataattttgaaaactgtaatatccatcatatcttggttgatgtcagagaaacactaatgaggaagaaagtgtttggaagcgctccataataaagtggaaatgatttgtataggaatacatactggggggatgtagtgtactcatcagctggtagacacttttcccctaggactgcctttggaagcccccaaggagctgccagattctgtcatcacttggacaatatgccataaacagctcgtttgatcaataaatagctgtttggtttatggatagcagttccaatgtgatcagacaacatcattactctgatcaaaaaatgtaaaacaaaaaaaaatttttttttttgagacagcatcttgctctgtcatcaggttggagtgcagtggcatgatcatggctcactgcagcctctacttccctggctcaagcaatcctccctcttgagcagctcggactacaggtgcatgccactacgcctggcttttttgtagagatggggtttcatcatgttgtccaggctggtctcaaactcctgggctcaagcaattcccctgcctcagccttccaaagtgctgggattacaggcataagccagcgcacccagagtagaatgtaaaaacaaatcagcttggtgggctctattgcatgctatttattcttatgtttgggtttctacatactcattggcggtggccagtggcctggtcatatggtcaggcagaagagcaatggagattggtctattaaagggatgcccttacacggcatggccctgtggaaatcattatgggaatctgagtggtgcattaacgtaagacatgtcagtgctcataagaggacctcccttccagcatcaaaaggtgattggagtccatgagcagatatccagtttattcacttgatataaccacctgggtccataaaatgactctgggggagctgcagcaatacatagatggcgtgaatatagacatgctcgtcttacatcttctgaggaaaaaactaccaataaaaattgttctgtctgccaaaaagagagacagagactccagatagacggccagggggcagatttcccagggagaaggccctacacatagagaacaacttacactgatgccagtggccagtggccatcggcgagctacaagtgggtcctgacaggagtaggcactctggactgggctttgcttacacagggagagatgcaaatacttaagagtatcagttatgcccagtcaggtatgatccttttactataaaagatcctgggtcaaagacaagggtgtggtctgtgataatcaaagaatatatatggtctagtgaaggagggttcctggcacagatctcccaaagtccttggaatttcctgagtgataagaatatcttcattatgctaagaaggtgactactaggggagagtctagatagcttcagaatgggggtggtttgccagaaaaactgcccacgtaattagagtttaagccactagacctctgggcggaggagggggctggagactgagtttaattgcatggccaatgttttaatcaattatgcccatgtaatgaaaccctaatttaaaaagaactaacgaaacttcagaaaagtaaggctcgggggagcttcctagtgggtgaacacattgatgtgctaggaagatgacatgcctcgattccacgaggagaggacatggacgttctatgttccctccacgttccctcccccaactttttcccagaccatgcatgtcttccatgtggctgttcttgagttctatcattttaataaaactgtaattgtaagtaacgtgtttctgtgagttctgggaatctttctagcaaattatccaacttaaagtggggttgagggagcctccaaatgtgcagccaagtcagacacaagtgtgagtagcctggggactctgattgtggctggagtctaaaataagggcagtcttagggcaggtgcggtggctcatgcctgtaatcccagcacctcgggagaccgaggagcacggatcactagaggtcaggaattcaggagtttgagaccagcctggccaacatggtgaaaccttgtctctactaaaaatacaaaaattagctgggtgtggtggtgggcacttgtaatcccagctacttaggaggctgaggcactagaattgcttgaacccgggagacggaggttgcagtgagctgtgatggggccactgcactccagcctgggtgacagagccagaccctgtctcaaaaaataaataaacaaataaataaataaaggcagtctttttgggaaccttgccctttaacttgtgggatctgtttctaattctaggtagttagtgttagaattggattgaattctaggatatgagagaattgtttagaacacagactttttattttttgcatttattgtggtaaaatatacataacataaaaccttttaaccatttatttttaaacattttaagcttcttattgaaatataacaatataggaaacacatacacagtacaacttgtaagtacactgctcaatcagatttcatctggatcaagaacagaatattccaatattccggaaaagaaaagaaacatgttaaaaagaaaagatttttatttaaaaaacctagacatagtaattaaaatgggggttaagagaggtaatctctctatccctttgtgtgtgtgtgtatatatatatatatcatacataatcccatatctatgcatctatacccaccctataatgtaccattttcagaaatgggtttgcagaagactttctaaggggtatttgttttattgtttaaaagattatgtggtaataactttgggatacactaaatagagtaatcaaacaagtttgtcacccaaggaaattttcacaaattcagacttcagggcctattgactgatcattctcaagtcaagagaggaatgaggagaatccttcttgcccattctagatatattttttaaattatgataaaatatacataacaaaatttaccattttaaccatttttatgggtacaatttagtggcattaacattcaaaatgttgagcaaccatcatcgctatccatttccagaatttgttcatcccaaacagaaactatgtactcgttaaacaataaccccaccccccatttcctcctccctgcagtccctggcaaccactattctcctttctgtttctgtgaacttgcctatgctggtacctcataaaagtggcatcatatttggccttttgtgtctggcttatttcacttagcatagtgttttcaaggtttatcctgaggtagtatttatcagaatttcattcctttttaaagctaaataatattccattgtatgtattatagcacatttgtttatccattcatgatagacacttgagctgtttccatcttttgctattccagtaatgctgctatgaacttggtgtataaatagtggcattttatacatttgtacaaatccatcctcatgtatttttgttctataaataaacttttggaggcattttacaatttagaggtcaaatagaaattaatggtaacatacatttcaaagagtccaatgttttattatcgacattaatatttgttcatgctgaagatttagggatgaagtaatgggcaaaaaactgacatataatcgacactacacaggtatctcttaagtacatagtaatattttgctaattattggactaaaaaatataaaagatagaaatacatcaattactttgtgtttcatctttctgcatgtacttttacactaaatacacagcaagtacttatactcggttaaagattatgcttttttctttagcaaccaaaacatgcttacccttggttaatcagaacgtgtttcaaaagataaaatttcttaaagatacgcatggcatttagggctttaaacctatactcttgctggattggctgcttgatgattgctctctttcttttgtaatttccatctcaattttggctttgattttctcccaatctatttggagctgcaatagaaaaaaaaaagaagaaatatgcttagatagtgtaagacatttttgtttactccaaagtaactaagagtaaacagatagactgtgtgacttccaaaagattagagaaaaagagagcatcaaaagattagagaaaaagagagcatcaaagttaagaagaagaaataatgcttggccaggcatagtggcttactcctgtaatcccaatagtatggaaggctgaggtgggtggattgcttgagtctaggagtttgacaacatcctgggcaacatggcaaagttccgagatgggaaaataaatacaaaaaataaaaaaagtagctgggtgtggtggcacacacctgtagtcccagctattagggaggctaaggtgggagaatcaactaagccctcaaggtcaaggctgcagtgagccgtgattgcaccattgcactccagcctgggtgacagagcaagggccctgtctcaaaaaaaacaaaaacaaataatgctcaaaaaccacaaagtagttttaagaataagaccaaaaaataagaattatataataaaaagcaaagactctcattgtgatttaaaagaccaaaatctagtcacagctatttataaaggtacatctaaacagtcccatggagccttaggattgtgtacacgtgctcagggacaaggtaggggatgagatggaccgctgtcttccaaacgaggaaaaagtggaccggactctggttaccaagccatttttcaaataggcttcacatcttatatactgcagtttccactggaagcctagttatgaggaaagacagggattcattagcttcccctaagcatattctgtgaaagtggctcctttgcaccaactcttaaagtaagacatggtggtcattaagacaatgaggaaaagatgttagagaaagcgaagggaaagcaagactgggaaacacatgaaaagaataactgcaaagtgcaaacatttttatttgtttgcttcccttctatccgttatgcagtctcccctcccctagcccagccctattcctctcttaagttcattagacttgttaggaatagactctgcccctgagttctatgagcaacttctttaggaaagcacattctaccagttaacaaagtttggagatcactaatttaggaatgtttatcctttctgaggcaagacatggaaaaaattgggtcatagattaaactaactctgatttacaggaaataaatccaaacccctgagtctgggccaaaagtgaataggttttcacctctgtttaggggagttgaatggaataagtagtattaaagcagaatgaagtaatctcagtctgcttgaacagatttagcttaagtaagtgaggggttaatttaactttaataggacttcatgcctcttttatgctggaggttaaagaaattaagtattttttttaattccaatatcccatacctgaattgctgtgaagcaatttgtaaatattttggctcacctttatttaaaataacaatgccatatacttatgtataatacataaaatagatgaattaataaacgaattcctctcactcatagaagacaaatgtctgtgctaagatgcaagtgacagctcattgaaaagccaagcagatgttagattatttgaaagactcattttttcaatcagggcaaaatctgatattttttaaacggcaaagcactcatttctatgtctaacaaaacacttatagagaagacgaaacttgatggatgctttgggtttcttccagccttaaattgacttacatacatttctcaaatcaatcacaataaaaccatacattgataatatactgaacaactgctgctctgttgcaagtaaattgatgatatctgtattagttatttgttataatacaaatcagggtgtcagtggatagctgtcctactgaaaataaatgtttcactttcgctttggcattgatctagttttaaaaagtgttctacagataatttagttcgtggattagaatatttttaatagtaggttttagataagaatgttctctgatagttgtcaagtgatttctacactaaaatccatcttttgctagtatagggactgccaatattatctggcactccttattctactcgctagccaattcttagtcacctataagcaatttcaaaatcataccaaaaggctctccatcctctaacacatttctctttctcttcctctcagctgaagatcagcttcctactttacagagaatatagtggccatgaggtatgaattcactttattttccttccttgcattcacgaacttacctgtatctacacccatcattatctttctcttccgtctcaggccaacctcttaacatatgtctctgattccattttctttgactcctctaggacatctgacttcaattattcctcacacattaaatgtccttcttttcactgactcgctctcatcatccttggctctctatgctgtcttctccctgcaagctaccatccttcttcttctcattcctgactctcattctcttccctgtccactataattctgatcctgtgacactttaagaactttgcactaaaaccaccttcggctgttttcagtccttatcttatataccttctctgtatgattcaatttttcattcaacaaatatttagtgcttagtatatatcaaggattgtctgaggtacaaggattcaccagtgaacaaaaagatagaaatcactgtcttcatagagagataataaacaaagataaaaatggaaagggcagataataaacaaaacaaaaaatatatctagtatgccagaagcggtaaagattttgaaaatagagaagggagatagtgagcaccaggaatagaataggaggttgcaatgtcatcagtttacttcacgggaggccaaggcaagaggattgcttgagcccaggagttcaagaccagcctgggcaacatagtgagaccctgtctatacaaaaaaataaaaaatttagctgggcttggtggcattcatctctagtcccatctacttagagggctcaggtgaaaggatcgcttgagtctggctatgttgaggccacagtaagctgtcattgtgccactgcactccagcctgggcaacaaagtgagaccctgtctcaaaaaaaaaaaaaaaaagggggacctgaaggagatgagtgagacccatgtgtatatctggagaagggcatggtgacatgcagaagtacacggacggccctggaataagagccttctctggaccttgctgaccactgctctttgaaaaatctctcaagactgtataataccattctcttctggctcctgctctcctttctaaatgctgcttctttctttctctctcttttttccctatattctgctccctagacaatgttggagaagaaatataatttctcctcaacgcttgtaagtttattgatgggagagataggtgaaaagagaaaaacaagccggttcaataatatgtgcagtgtacatcacagcaggagaaatctcaatgaaaggtaactcaaaacagtgtcttggaactctgggttacatagcattttcaacaaagaacaataaattttaaagatgtgacaagactgtttttagagaagtgaaaacagttttaggcttccagagattggaaaccatgggaaaaaaatatatgggaagaaactaatcaggtgaggtttgttctatttttgagacagggtcttgctctgtcacccaggctggtgtgtggtggcccaaacatggctcaccgcagcctcaacctcctgctgggaccacaggtgtatgctaccacacctggctaattttttaaatttttttagagacaaggtctcactttgttacccaggctggtcctgaactcttgggcttggcttacatgatcctcctgccttggtctcccaaagtgctgagattacaggggtgagctaccacgcccagccacggagtaaggttttttggtagattgctctggagtcgtccctgagctgacaagagttgtctctagtaaaggagaatttatattttgtctttaggaggaaaagggggagaatagagctcttccatttgctgcagcttgtctttagctcaaaaatataagtgtcaaagagacatattttggggtgtcatattttggtttccttcaacaacctcttaactgttaatattcaccagggtccaaccatagctttctaacactttccctaagaaatatcaattcatatagcttcaactatacctagatggtcaaggcaataaatttagttttctagcccttatttctcccttgtcaatgtccttttgtgttcatatttatatttctaattgcctgctagatacctccttctggacacctgatagacactctaatcacatacaaaatggtatattttcatgtattcaaactcaaaggtccaaaatgtgtatattcttatgtattctttagattaatggcattcccatctatcagctgcccacactagaaatgttgaagtcattctcaaatgccctgccttacctcaccacctctcctcccacccccagtcaccacaactgttctcttaattttacttctaaaatttttcttaaattaatcgtaccctttccatttcctaatgggattattatagtaacttcctaactagtctcctactcaccacgctcgcctctaagctatctttcacgtctgatgttatctttcaagtcattctcttgattacaaatctccaagtcttcccattgccttcattacgaagtctattctcttatcctggtattaagacctttcaatgacttttcccaaccagtattccaaccacccagggtccagagcagtcactcaggattcttcctcattcattcaataactcgtacgtttgctcttattttcatctccttcaagtgactggcaaaatcttaagataattttgtaaaaactgttgtttccatttatttttaggaatcaggattttattttattatgtatttctttatttttattttattttttgtggggacggagtctcactctgttgcccatgctggagtgcagtggcgtgatctcagctcactgcaacctccaaatcccaggttcaagcaattctcctgcctcagcctcccgagtagctgggactacaggtgcatgccaccacgcctgctaattttttgtatttttactagagacggggtttcactgtgttaggatggtctcgatctcctgaacttgtgatctgcccacctcggcctcccaaagtgctgggattacaggcgtgagccactgcgtccagcctatttatttttaatagagacaacgtctcactatattgcccaggctggtcttgaaatcctgggctcaagtgatcctcccaccttagcctcccaaagtgttgggattacaggcttgagccactgcgcatagccaggaatcaggattttatattttttgggagatggagtcttgctctgttgcccaggttggagtgcagtggcgtgacctcggctcactgcaacctctgtctcctaggctcaagtgattctcccacctaagcttccagagtagctggaactacaggtacatgccaccatgcccagttactttttttttttggtagagacaagatttcgccatgttgcccaggctggttgctgaactcttagactcaagcaatcctcccacctcagcctcccaaagtgttgggattacaggaatgagactctgtgcctggccagggatcaggattttattttattttattttttgagatggagtctcattctgtggcccaggttggagtgtagtggcacgacctcagctaactgcaacctctgcctctggtgctcaagtgattctcccacctaagcttccagaactacacctgcagctggaactacaggtgcatgtcaccatgtccagctaactttttttttttttttttttggtagagacagggtttaaccatgttgcccaggctggtctccaaactcttagactcaagtgatcctcccatctcagcctcccaaagtgctgggattatgggtgtgagccaccgcaccttgcggaatcaggattttaaaaggaaaaagtgatcatgttattgccctccaatggcttctcttatttaatttgccctatgaaaccctaaagtcaatccctccattgcttttactctttcctactttaaagccttccctctcctggaacatgttattctcatctcctacccaacctctaccctgcagtgagcttctactattcatcctctaaagctgagttcaaatatcatgctctttgctagaacagtctctgctgattgcctcaccataggtcaggacccccattcataaagtcttatagcaccacgtacatctccttcaaggcaattatcacaattgaaatgaacaattacctagacaactgtcacctccatttgaatataaacttcataaagccagggccagtgtctgtcacgtttactattatatcccaagcactaaggagaaaacactgtctacaggaggcactcaataaatactgaatgaataaaaggtaaataattacccagcaaatcagtaatcagctaacaactcctcactattaacaattcctccaaacttaaaacctgtaaagcagcttttcggtagtagctaagcctaaagtggtttgtcctaagtagagtgttgactcagatcttcaaaattttaaactttctgaaatcctgctcatgagtttgatttctttcactctttttctttttcctagcaaatgtctgaagtatttcccagatctacttttcttcttgtgcagagtatatatttaatataataaatgtattctttgagtggattttatttgctagatttaaaatttgttttataaatatttacagaacactattgtagaccaagtacaataactctaaatatcagggttgttggaaaacagtactccttgtaaaaatcccagattgccatattttaaattagaaatggccaaataacatttcagggctcataaactaagtgtctatcaaacttctcacttcttcccttatggtagattccattcatttataaatttccagatggtatgcattgtgagcccaccaaaatcaccagatatctagaataaatttctcaatgttatttttaaaagacccctttctatttaactcttagttctgaaataaagcatttatataatcataagtctggcaaagataaatatggatgatatattatgactagattatagacttaaatgaaaccaaaaggtcagcaagtaatgcagatatccccaagagctattttcccagggttacattttatttcattggtgggaaatttttaagaaaaaaataattttcatcataaaatactgctttatgatttttagttaactccaaatgacatttatgaagaaaagtaggaaacgagaacatagtaccatagggagtcaaagtaacctatatagtttctggatggaaaaaaaaaaccctaaaatacctaagaaagccatgttgttctggtactcttatgattaaagtattatattttggtaacagttgaatatatgtataatgaaaaagatgataaagatgttaatttttgctatctaaaatataattttcttcatagtaaggactttcttttctttctcctcccccccccttctttccttccttccttctctctttctctttttttctttctctcttttctttcattctgacaggatctcactctgtcacctaggctggagtgcagtggcatgatctcaactcacttcagccttgacctcccaggctcaggtgattctcctacctctcccaagtagctgggactacaagcatgagccaccatgtccagctaatttttaaattttttgtacagatgggatctcactatgttgcctaagctggtctcaaactcctggactcaagtgatcctcctgcctcagcctcccaaagtgttgggattataggcttgagccaccacacctgatcagaactgtatttcctatgttctcaaaagtatcaaatgtgaatattgaaaaaatattgatggcgaggaggaaaaagcagagtagtttaatctgctttaaaattatacaataaacaaggtgggtgctcagttttaacatatgatcatatattcaaaactgtgacacaaagatcagattacctgacctttgtgtcacagttctttgggctgcttagcactgttttggtggtggctgctgtcatatattatgaatcagagtgtagccccagagatcccagggatgctgtgtttgtcctaatagtagagtatgcccaaactcccaggattcacttcagtactaagcaggttccaaatgaaatcaaaaaaaggtttgtggagcttctaaaaaacatatctcctttctaccatgaaacccacaacttgtagctatcctggatccagatgtcgaagttgcactgctaaactctaagaatggtctcaaaggcctcactaacatgaaaattgttctgaagtgcaaaaatgtagatcaagacactacgtattctaaatacaataagtagataatgttggctttaatagaaattgtgggtgccttctctctatcttctctcctcttcctaagtctcctctaacccagtctgcccctatgatcaatcagaacattccattttattctacaccaagaaggtatgctcccacataatctataagctccaaagagacataagaggctgtatctgattttaacccctagcatagtgtctaggccagagtgagatatcatacattttttgaataaatgaatgaataaaaggctaaagaaagtggttcacagagctgaaagaaaggtcagccctgtcttgtaatcacagctcttaggagtcaagcttcttggatctatatggctagtgacatgagctctgtttctgctgtctgagcctaaaagaatctggctaagtggctataatcagttatgctctaggcaatggggcaaactcattctgggtctccttgtgggctgatctatactggaatgacttccttctttttatttttatttgtttatttagaggtggggtcttgctatgttgcccaggctggccttgaattcttgggctcaagcagtcctcctgcctcagcctcccaagtagctgggactacaggcatgcaccactgcatcccagaatgactttcttctaattagagtaataaaatctgagattctggtaggagcctggaaggcaaaggctgagtcttctttggttctaggtagtgaaatctacctaggctaggcacttctaggaggtgcaacctagctttctagaattctacaaagtgaccaactatgcattttctggtcagtgccctctgtgcatatatatttcccctacagcagaagaggcagcttgtggcaggtgaaatttaagagttagaagcttttattccacccacgtatattatttatctaaaaatatcaaatagcacccaaccttagcacaaatggaatattatgaagacagacttgagttaatcaaaatatgcctgcaagattccagagaaaaatttagtactataattacagtcaaaataagatgtcataaggcaaaaagtaattcttttagaggttaaaagattcaaaatttgaatcattcacattttgtctcattaggatgaatatgacatatacttataaagcatatgtattattatacaaaattgtgaaatacttacaccttctgcataatgcaagtatcgtttattagtttcctgtttaccaaatgtctccaaaaacttttgacggtaagcaagaactgtatcaacatgtgttttgtattttacagccaattccagtgccctataatgagaaataaaacagattattaacattgtttgtgtcagactccatgagtagtagagttctggagttggggataagacaaatggctcttccctctgtttattccacaatatgaaataccattttctacctcatccatcttgcaaattcctacttatatacttcagggcccagatcaaacatggcctcttctccctgaccagctcttcttgtagaaataaatgactattatcttatctatgcttcataccatttatatatatactattattacagcactccttatagtacaattgttatgagtcttttttctccactagccaatacacttattgaagggagacatttctctttggtgagtaatacagagtacatatgtggtaaatatgcattgaaaatatttttgaggctgggcacagtggttcatgcctgtaatcccagcactttgggaggccaaggtgggaggatcacttgaggtcaggagttcaagactagcctggccaacatggcgaaaccctgtctctgctaaagatacaaaaattagctgggcgtggtggtacatgcctgtaaccccaactactcgggaggctgaggcgggagaatcgcttgaatctgggaggtggaagttgcagtgagctgagatcgcgccactgcattccggcctgggtgacagagcgagactcaaaaaaaaaaaaaaaaagaaaatatttttgaaatcatcctgtaattcaagtgaatgaaattccccacagtgtaagtggtcccattattttgaccattttcataagtctatactgagtttataaaattaaaaactggtatctttacattattactatagcaaattaaaaatcttatgaaaataacaaattgaggctaagaagtctgagaaaatgccttttgccatctgagtctcaggaaaagttgacagtcatttaagttttataattcaatcaatatttatgcaagttatttttaaagtaatattttatttaaatggtagatgataactaaataaattgctgctgaaaacagtggtataaactaaagacataaaatatatacactgatgataatttgtaggagaataaaaagattaatcctcagttccaggcttactttcacatgtgggttttggacagcacctcagccactgcaatcctgtgcataactcatattagttgagtcgggaacaatccagtggactatagctctcttacactgttcactgtcatcttgtttcaaaataagataacagtcatcataatagtcaaaagcacattatttctcaagttctcttgctttctaatatgacatacgacttctgaatattccagtcaggatttatcagagccaactattataagtctgttgttttagcaaagctgactactgattagattttttgcaactagactcttcactaggaaaatctggttcatttttggcatgctttggtttggcttactattttttttttagatggagtctcattctgccgcccaggctggagtgcagtggcatgattttggctcactgcaacctctgctgccagggttcaagcaattcttctgcctcagcctcccaagtagctgggaatacaggcatccgccaccatacccaattaatttttgtatttttagtagagacgtggtttcaccacattggccaggctggtcttcaactcctgacctcaagtgatctgcctgccttggcctcccaaagtgctgggattatagctgtgagccaccgtgcctggcttggtttgccttactattgatcaaactaaatagtcactttaaaaagtattttagacatggtgtatgtattgattgacaactgatagacttttgagagatattaaacacttaatatgcaaaaattatgaatgtaagttatatataatacaaatggtaatgccaaaattgggcaaaatgatttcttataaattgacatacactgtattgtgaaatccaagggtcagtatttgctaccatcacacattctcacaaaattccctcattcctctgtgaccttacgtctttcagaaaaaaaaacaggcagaaaagaatgtaaagttactagaatatagaggggaaaagtggaagataaagaaggcaaaaagcaattcacggaggctcaaaaaaggagaaacagaagtaaagatgcctcagttctgctaaccctctcccatataatccccccatgtatatccctaaggctctgattccagttgtgtatgtgtgagtggagactgatgagctacttttttttgtcaccttagaagctccatctcccattctttctttatgattgtacatgatcagggaaggagatcttgattgtgcaaaactgaaagtattctcaatggggagtacataaaatcatccattctgggttggagcttttccaaaattccgaatgagatactatggtatgaaacatcaatacatttaattatgtagaaagaatagaatatgatgtctaatcctgcatttagatgctagatcctaagaattatctatcattgtcattattattattataataaaatatgtatcgattgaatagcaatggctaagggtaaacattcaaatgatatgtgctattttaaatgttctctaaaagcacatactgggtaaaaaaatgtttcttctccacatttaggagggaacttactccaaattatctaagggttttgggaacagtatgtctctagttttaaaatggttatttggcaaccaaacaaatgtgacattagattctaaggctggaataaatccatgtattttaaatagaaggaagttatataaaaagatgttataacttcaaaatatgatttttgcataacttgaatgaagcgaaatcactttgtataactgagatcagaaattatttttattaatatgcacataaaggattaacatgcatatttagagtttctagtttctacctctcttaacttcagtttttgagaacagactactaccaaatgtccaaagtggatagcaaacagataacttgcttacctataactcttcaagagctgtaccttattaggttgcaggcaattttcaaattcaaacatgaaagacagaagcataaaccagcaagactatgcttctcaagtggaatatcacatatgaacaaaacaaaatctgttcccttctagaggatttaaacaaatatagagattcagggatattaaaagcaatctaatgtatttagcatctaacaaattctatccttctggaatgatagaatatcaccattttgtaagctcaaattaatagatttgggcaatgatcatcaatggctactaacatcacaaaaaataccatgaaaaaccactacagccagtcattacaaaaacatctaacactactataatgaagtcttatcaaaaaaaaaaaaacctaaatctaatcaagttcctagattcaacaaccaatatgcaactaattcaggggacagaggactatgttaaagtacaccacaaagatgcaatgtttgtccaaagatccaataatgtccacactatggtaaattctataggtccagtttcttcaatgggaaaattgcaagaaaacacaaaaaagaataggagaagctatagattaaaacaaatttaagaacatatcaaccaatcacagtgtgtggatctttattggattctgattcaaacaaaccataaaacaaaacaaaacacttatgagtgaaacagagaaataagaacagtgaatataattactgtttacttttgaaggtatgactgcaatattgtggctatgttaaaaaaaatttagagatacatgctgaaatatttacagaaaaaaatgatataatgattggggtctgctttaaaataaatggtagggtaagggtagaaattgttcacaaattgatcattgtcgaagtgaatgatgggtacattcagactattctctctacttttgtatgtgtttgaaattttccataataaacaattttttaaaattccatcttttcatcccttctgatctctattgctaaattctcttcttaaagcacacccttaaatattggtattcagcagatatctgcttgctgctctcttttcttaagttttcgtgataaacctcagccatactcatggcctcaactactgtctgtagactgataattccttcactggctttcccctcaatgtctaggatctctcatgaacattaaacttgtatatcccactccctactgggccttatgaactggatgtagaaattcaattaaaggtaaacaaattcaaattgttagatagcttaaccattaccttatacttgtacaaaaaaatctactacagctctgttctatacacatattcaatgtgggccttccctgcagctaaagtacataaacaaattcaagccctgtgcataggttatatgtaaatactacgtcattttatacgaagaacttgagcatcccagattttggtatcctgggggtcctggaaccaatccttacccatctcacggataccaagcgattacacttaattatctgttgaatgaatgaatgaatgtgcagttggaacaaatactccaaattgtttcagaaatatctgtagaacttagaaataaaaacaatatataagtttcctgagagtttcttagcagctataattacttttgctgaatatttgcagtcctttcttatccaatcttgatatttatgctaaaagcaatgggaaactatgaatttcactgaagtgggctttattgaagtgaatcagaggtcaagagtgatacgaccagatttccattgtgaaaagatcactatgactgcagagtgaagaatgggtaggaaagagacagagtagatatagggagatcagtgatgacattaagcagaaaaacttggatcaacttacgtaatggtactagtagtgaagtggatgagtgttagaggcatttgggagggaaatggttgataatagggagggcgaaggtgaggaaaatgttaaaagtaacttctacgtttccagctttgtacagctgaaagaatgataagataaattaggctggaggaggaccaggtttatgagggaataaacataaatttgagctaaaaaatgtgagatatctaatggaaatgttaagtaggtagttggagaattgaattctggaagcaaatatgggcagaacaaaaggctagatgagagatgcatattttggagtcttaagtgtatagatagtgtagtgtataaataatggtcagaatccaggaacaatgctctgggatctttatcatcttttcaggtagactcagagatctctaccagcacctgaccaaaccactggcttacaattaggtaaaagcaagaaacacatgaaaaggagatgccaggagataagaagaatggaggagcacccagaattcattctctttcctcattacatcttctttgaccttcttgttttccctctccctgagatctaatgatttcaagagaaggtcccttactgagaactggaaggtgaaggggggcatgcggggaacaggatataaggatagcagggaaagtttgaggtctcagcaaaaaataagtagagacacatgatataagccttaaaggactggagattttataagatagggaagtaaagatgagggaggcaaaaaggacaccaactccactcacactggatcctaaggaatgtagagtggagagaataaattgactccatttgagaggactggtagagaagtggtgttctcttctccaccttctcttccaaataaaggtaggtttcatttgggtcaaggaggtacaagaaatgttcagaaggttatattataggccatcagaggcaaatttcctcaccttcttctgtgatacctactcactcactgcatgtatctacacccaataaatgtttgaagaggaggaatgctgcaaaatgatgaagagtattgcatagagagtaagggcatgaatattaactacctactatgtatagataatgtgaaatgtttccgctcttcaggaagtatataatctgtaagaggaaagacgatttaatatctgcaaatataaataaagagagaaatagtaatccagtaaaaacaacataagcatggccgggtgcagtggctacgtctgtaatcccagtgctttgggaggccaaggcaggcagatcacttgaggtcaggagttcgagaccagcctggccaacatggtgaaagcccgtctctactacaagtacaaaaattagcctgtaatcccagctacttaggtggctgaagtacgataatcacttaaacccaggaggcagaagttgcagtgagccgagatcgtgccgccgcactccagcctggatgacagagcgagactccgtctcaaaaaaaccaaaatgatatatgcaatggtaccagccatagataattgattgcttagtgataaattgagctcttctttgatattagacaacttgggggttcaaatcctagattttgtgcttatttatatgtaaacctcaatttcctcatttgtaaaatggggctggtaatatctaaacttctggagttgctgagataacctaacgacatgatatatagcaagtgtctagcacagttaattcctagcacatcataaccactgaataagtggaggccagtgtttagaagtactatttcaacctctgtatgttcccactaaacattagtatgtgggtcattttttattctttagatggaagtttttttttacagaattgatgtactgaaccgtatcaatctaaaaggaggaatgctgcaaaatgattattaatggtcaccaagcagttaattatgtactgctggtaccattgtttatattgtttttactggattactgtttatctctctaattatttatctttgcagatatttatgttatctttccccttatggattatatgcttcctgaacagcagaaacattttacattacctttacatagtaggtagttaatattcattctatgtgcaatactcttcatcattttgacatttgactattattaatgacaacgaaatggaattcctaattaggttacaagctttttaagataaagaccattaccttaaatttttttttgttaaattgtacagtattcagaatgctatagcaagagtagtgtctacgatttcaacatattttttcaaaaacactggtcaaaagaatgctataaacacaattcttccccatttctctattagctgggtaatgatacatataattttctataagttatttaacataaaatttaaaaaatattcacactgtctaaactagttaccttaaactttatgaattatgaataaattcaggacaaagacaatggcttatttatttatttatttagatggagtctcggtctggtcgcccaggctggaactcccaggttcaagcaattctcctgcctcagccttctgagtagctgggattacaggcgtgtgccaccatgcccagctgctttttttgtatttttagtagagacagtgtttcaccatattggccaggctggtctcaaactcctgaccgtgtgatccgcctgcctcagcctcccgaagtgttgggattacaagcatgtgagccactgtacctggcagcctatttatttttatagaatgaaaaacatctttcatgatcctttgtacagataaacaatgaatttgtgttaataagggacaaaaatagagtagctaaattatatgaatagtatagatcattagccataaattaaataaggagactacagtatgtcaatcataaaattaaccatctgccatttttgttacttttagtcaagggaaagacagagataaaatatctatagaaattctaatctaaggaagtttaactaaagagccttgtaattgacagatacaggggttatttttcagcccaggcagaaacaaagatcatgaaagacacttcaaacctggaaaaatatgtcaattccacaacaaactacatcaggagtacataaaaactatagttttgttcactgggagacatgtacctgagagaatgagtgggaggaacctcttatgtcacagagaagagcagcatgccactttgcctcagaaagcaatctgtccgagagcctaatgtaaggctgttgattgctgttgaccaatcctttcctctttcttccttagtactacacatctctcttggttcttttctctgcctgtccgactgctttatggaataacatttggtgtctttctttcctttcatccatctcataatgtagcggatgtcttttcattccacacattccccaggcaattgcatccatttctcttgcttcaactactatccatttgctaatgactcctaaatctaaacctctagttcagatatttcttatgagctccaggtccatttaatcaacgattataactttttgcgagtatttcaaattcaacttggctaaaatgaaactcaatatcttccctatcaaatctgcaaatggtatggtgtcatgatctctccagttgctaaaaccaaaaatttaggaaacaccctagcctctcttcttcacaccccaacttttaatcagtcaaaagttcagagaagaaataaattgtaaactattcacaaatatgaatatgaataaattcttctgtggtgttaagaaactaaaatatagtggaaaatgtaatttactaagtggtagatggaaaaatacattaaggtcaaacagattttggaactgatggaaagcattcttattacctttcccagttgtagagattaatattgatctggattgcttgataaacaaggccagcctgaagaagtactatttcagcctcctgtatgttcccactaaacagtagtatgtgggccatttttgattctttagatggaagattttttatagaattgatgtactgaaccttatcaatctaaaaaagaaaagaaaaatattgaagtagatagtaacagaaatataataaattacgctaagaaaaaacacatgtacatatatgtaaacattaattacttacttcaccaattgctgcataggctatttctgcagtagtcatatctcgattagcaactgccatagcagctagacaagcccacatggtttgctcctaaagtaaagtatgagaacaattatcttaactatgtgactgaactgccttaaaataagcagtgatttaaatactcatactaaaatgatattttaatttaaaaaataaaaattactgagcagggcattaaaaaaaactaataatgtgggaatttcattgtggccattttgttaaaatatattaatacacagaaaacttttgaatgaaattttcaattttgagttattaaggatttatttctgaatttaaaataataactcaaggttataaaccttccagtctttttgacgaggtgtcaaaaaatgtaatttatagggaaccaaagaaatagtgaagttctcagacaatgatattatggtagattgctactgatataccagttaagaagaaattacttaggcagatagtgagggtacagaagtcctttacgataaggttttccttttaatgaaaagcagcccccaaatcattttcttttctaacaaagagcagcctgtaaaatagagctgcagatataaacaagcaagctggaagcttgcatgagtgaatgccagtagttgtgcccatagcaatatgctacctgggactggggatgttcaaacagcagctccatcttctctttttgccagccatctgtacagtaaggagtatacaagatggcactggccaggtggaaagtctatttgcataataagattagggtggggcaaccagccttccctgtgctatgtaaatgtcacacctggtcaaaccaatctgtgagcactatgtaaatcagacacggcctcctcaagcctgcctatgaaatctgctgcagtccaccacttttccctttttggattcctctctctggcaaggagctgctctcctctctcctttcttctgcctattacgctttccactccttaacctacccacatgtgtccgtccttgattttcttggtgtgagatgacaaactccgggtatttaccccagacaatgatgctattcaccaccaacaacccattgttaaaaaaagcatctaaaagtcatttcacaaaagtgtattctaaggaatgttcactgatgttcaataaaaaaggtctatggtcaaacatgtttgaaaaatactagattcaaccaagttggaaaaaggctgatcgaaagcagagattcttaaccttagctgtacaaaacaatcatctgaggaaattaaaaaatatgcccaggactcaatccagatataatgaattagaatctctacgggagtagaacttgggaacctgactttcagaaaacttccacagaagatttttatatgtgccagtatggaaaaacagtttaaatttttatagcgtcttcagagaataaatcacacagcaacatgtattcctctgtattgcccatgtctttacttataaaaaaagacatgatcttattcacaatttttccagcctttaagcctattatcattactcattttgcacaaaggtaaactactatgaaatatatatacaactatgaatctaaaatgtaaattaccttaacaaagcgacaaagtctcacagcatcttcccattttgaactgcttacatattcatggagaatagcaggatatggtgttatgctgatgtgaaccagggagccatcagctcttctaatagttacttgatttccaacaaaactcacaatatggggatttttactaaattcactgttgaaaaaaaaagcaaagtacaatttaaagttgtattctgagcaaaatttttcatgtatattaaatttggggagtggaccgtgaaatacacacggagtctccaatctccaaaaggcacacccccaaaggttaactccagggagaatgtatatgttcaaaaaaaatttcaatgtatttatttgaatacatattctccctggaattaactttgaatgtaaacatttgaatataacttgctatataaagtagcaaaaattattacatatttgagagctattcctaagagcatttgaaatcatctttttttccgaggcttaagataaatcacaacaataatttatatagctttagcttttaaaagtattaaagggtaaaacaataaaaagtaaaccaaattccaagactattttctcagaataaaaagaggtgagccaggcacagtggctcacacctgcagccttaactacttgggaagatcacttaagcccaggctgcagtgagccatgattacaccactgcattccagctttggcaacagagtgtgaccttgactctaaaaataaataagtaaaaagagatgacctttaaataaaaagactaattttttttcattagtccaaatacttttaaaaatacgctgttttattttgatgcctctctggttttgttaaggttttgaatttgaatactaaaaacaaactcaaaacagatttgaaaactaagctaaggtctagaattaagaagcctttgtattcctattttgtcaagaataagagatctccttgctatttcttagagaatttaggaatataaatggtttgattttctgaagcatataaatttttaaaaatttcagtaactttggtcttttcctacttttaatatcaaccaaaaattcaattctagagacatttacattcttgaaagtgttaacgtcaatgataatctgtgacagcgttgggtagttgtcacaaggttgtgcatcctgaaaaatcttaaagagtgcctagactaaaatcacttgatcacactgagaaaactacctgagctaccattacacaatattaagcttgaaaattatattcatataagggacaaataaataattcatatcataccacactttcaacttgattctgtcacttaagtctcaagctagctttagccgaacaatttattcatcaataaatctgactgatgtgtaaaacaccttgcaggattgaaaatagaagccaaaacatgatactctattagagttttatttactacaaaacagaattatacgcagtaaaatgttaccttgcatccctttcatataatgttttaggcaaaatgtctctgtccacataaactgtattggggtaataccacactataaatcgagtatcttgaagtccacaaaggatattgcatgtatcgttccatgccaaagtatgcaccattgttccttaatttaaaaagaatgttaatgtgctattagctttaatatgtaagaattaaaaatagatctttaaaatgcctgacaaacaaaatcccatacaatttctggtagatatgactctactttctgattctataatggtgaaaaacacataccaaacaatcacacaagaatttacagaaatatttgaatgctttacttagaacccttatatttttaatctgtaaatctttctttcagtgacaatttagctgcagcagctaaagacttgctaataagttaatcctcttgccctcaggccatcaagctccagatgatcctcagtgaggaataccgtcccctcaatattcaagagtcactcttctacaggggacccctagtctgcccatcagtgggacatgacagaggtgaagtcctcccttgtctcccttggacctagctgcatactgctttcaccaacccacggagccaccctgccctgacagctagcaagaggccaagatccacagaataaccaccattgcccctctgtcagcaggaagcagttacagaagactgacttttgtccattttccccatagaattggggtcttggactcttgagggtggaaatgttacagcaggtagtcaggcagacatgagcaagtcaggagaggcccctgccaccagcaccaggaatgtcaggtgaccatcaggtgatggtcaggctgttgttaagctgtctctctaaaataataattggttgcagccagtgccagggaaaggtagtctctcaatataaacactgaaactggaaatcagtagcttctcaataagatctcaagagctaggtgagtgggctcacacatgactaacaggcaaaatggtggaggagtttaactggtatacaaacttcctctagaaacactggagtggtaagggaaaaacgcctcaagtgagcatgtgtataactttagtaaacacactgtgcatgtggcccctcccaggtgttggcaggccactatgcatgtggacagcccacccaagggaagaattagggcagaagggttgcaactccccagaagcatgccaaagtataaaaccccaagtcaaagatcaaacagtgcacttgatctctcaagctgcctgcttgccctctaccaagtttactttatttcctttctttcctgctctaaagctttcaaataggccaggcccagtggcttacgcctgtaatcccagcactttaagagactgaggcaggtggatggcttgagctcaggagttcgagaccagcctgggcaacatggtgaaaccttgtctctaccaaaaatacaaaaaaatttagctggatgtggtggcacatgactgtagtcctagctacttgggaggctgaggcaggagaatcacttgagcccaggaagcggaggttttggtgaccttgatcttgccactccactccagcatgggtgacagagtgagaccctgtctcaataaaacacaataaaaatttaaaaataaagctttttaataaactttcactcctacttttttaaaaaaagggttaaatagctaagaagtattacaagatcaaaacattaaaacatttccagattcattcaaattatttattacagcaaatataagaaagttgacaattaaaacttaaaatgtattaaaattattttaccaagcttgataatttgttcttccttcccaaatcgtttcacagaagtgatacagagatctctatttttatcaatgaaagcaatttttctatcattggtaagtcctttttgatccagagcaatttccaagatttcattctaaaattttttttaaatgtaaatactgggttagttttagtgtttgacataagatcattttaattaattataaaatcatttcctttaagatcaattaaatgtcatttccccatttataatgataaaatgtccctgttaaataattttaaactgccaatatgttaatcgttcaaaagctgcactgaagtatatttgcctgacatccaaggaaaagatacctcttaaaatacaataaaataatatgtattttgatattctgtaggctgagaaacactcgatctgtcctgtcctacctttcgtagtcaaggtgaaagggtcaggcaattctgagtatcatatgagaggtctattttgattaataagttgcctaacaactatatcttaaatatttgtaaaaaaaattttggaaatatgtggaaatacatcatgtgtccagggccttaaattctatagattctctcacattcattcttgcaaaataggaaacaagcttgtaatgtaggtattactatacttactttgcaaatcagaagactagactcatattcactaagtgattttgctcagaaaaagccagtgtcaagtatatctaaacttgcaactcagacttctaactccaagatcactgcttttcatttgctagtgagatgaattttactataacttgaaaatgttttaatatagattcattttaattcaaaccaagcaagatttatttacctcctacaatgtctgaagactttggtaggaattgtgaattcaaccagaataatgactacaacatcaagtcattgtatcaaaatgtactataaaaaacactttttaaagtaaaacaaaacacacatacacctttatccaaattgatgaatcagtcatataccagttcataatacattttaaaaagttcaactctttctggaataccataatttatattttaagaaagaaaagaatttggtttcatatatatcaaggcatgcatgaaatataactctaggtattttcaaaatggaaatgtttcagagaaactgatctttacaataaagaattgcttatcatcgtcatcatcatcatcagaacctagtgtattcttttaaaaacactgttaaacagatatgattctcctaagaaattaaaaatcaaagatggatagtaattatagtaatgcctatgtacataggggaagaggggctcccccacttcattcagcagggcttcccccattttcctcttgtcaagtcctaccacctccacataggttctattcctcctgggttactctttgtagtgggacataaaagcagttttgtgttcattagaaccgtctcccttgccctacactaattaatattcatttactaatacacagacttgagttctagtttgggctctgttattgggaagatcctggatatgaatttcttccacatataaaataaaatagattgggtgatttttctattattttatagaatgtaaaatttaaaaatcctttgtattgcatacaaatgtactgggtaattgggtgaagtgtgacatgtagaagacacttccattcttataattaggaaattataaatttcttaattttaattgtaaattaaattattttaattgtaaattaggaaattcttacacttaggaaaagtgttatagaaagagttataacattaaaataaatatttaagcttattaattgactctcctttcaatcctactaacaaaaatgactgcatcttgaaaagctgagacatttactccttttgatatgcttaatcttactgaagaggaaaaactctgcttatatagcttggattaaaaatgacaataacggagaggttatagggaaataagcacctcatatattaccagtgcaaaggtaaactcatacactctctttggaagataacttcacaatacttattaaaattacaaattctcatatcctttgacccagcaacaatatttcaagaataaatttcacagttacactagcacatgtacaagaagatgtatatgcaaggtaattcatcttggcaatactgtaatactaacggcaaaagattggaaacagtttaaattctgatacatacataaaatgttataccatacagtgggaggaaaaagggttgggaaagcactttatgtatagatatggaactatctccagaaagacagtattatatgaaaaaagcaaagtgtaaaattgtttgttacatttttgtaaaggggaggaagagaacatatatcagttttgttgatacatacactaaaaatctctggaagaatatataagagattaataataatggtaacttatttggtggagaggcactacagtgatgaataataggtatagtagggagactaacactgtatactttttaatgctttttgatttctgaaccatatgaatgtatttgttattcaaatttaaaactagggccaggcatggtggctcacatctgtaatcctagaactttgggggtctgaggcgagtggattgcttgagctcaggagttcgagaccagcctgggcaacatggcgaaaccctgtctctaccaaaaacaaacaaacaaaaaaactaataattacaaaaataaatatataattttgagtaacagttcactagaagtattaataaaactaaaagtgtctttagaccctaatatatcagcaatttagaaggataactcaatgcaatgtgcttctttttctaaggctaaaaatcagaaaccaataaacaacttacaattcagggtcttttgtactttgtatagcgatttcttactacagtcttaaaacctaaagaaaatgctggctaagaacaggtcaatgagaaaactgcaagatacttagaaacacaaatacatttttatttactggtaagtgctaaaattttaatcaaaaaagaacatgtaactgaaaaacagtgaagagtttgacaacagacatataagtcagatcctttttttcaactaatttgcatgtatagcttcctatcacaaactttaccagtgcttagtctttaactgtgacatctttaggcaaaatagtcaatggagaatgcacattgattttaaataaaaaactaattcctttgtgtcctctttaaaatgaaaacattaattttgaaaaggaaataaataaatagtggctatttacattagaagtagttaatgtccattaccttatgagaaagaaactttccatcacctaacggctttccggttgatgcctcaaagaggaagattacttgaaaaaaagtagaacattaattaatgtgttatattagaatttttactggtaaaattcagtgaaactattataatccttataagaaattatttaactctctagaccacagagagagcagcagcatccaattttaatttattaatgtggtcacatttcttatgaaaacaataaaactgaatacttcttcctaaaacacattccctaattagaatttttattaatggtatggcattaatgctccacaggctcacaatgggaagtccaaatgtgaatgtaatttataattctgataactttgatttaaactaatataacaccatagtgtagaggccaaaggaaaacttcctctttgtcctttgaaggttaactgaaaatcaactcacaaaaggcagattaataggagaaatggcatacaaatttattagcttgcatgggggagaatcagagagtgattaccctaccatacaatggggtgcagatggttaaaagccacttcttccccttcttaagggaaatggagatggggaagtgtggatggtttttagaacgggtagtaaatgatttctaggggaattcagtgggcatgaagaacatacagtggcctggaacagtctgttgggcccacagagcacacaatggtttgtgacaaaagtctgcccaggtgtgttgacagctttctgtatttcttcctgcaatatgagtttagttaaggaaaactcagggaagggaccagagggaattgttgtcttctttggtgggtctgaagttgaggcagataagggaacttcagcacagcatgtcaaagcaccatattttggggtatcagtttctaagccccaacaatagaccatcatattccgcaaaggaaaaacatgttgaatgtctactataatgccaggcaacgtgttatgtgctactcagttttctgttattaatatgctactctggtacaatcaataatttatctggtctttgtcctggagcttcaaaaaccctgagaatttcctgagtgattagagtatctttattattgctagtgaggagactcttggtgggcccctagatagcttcaggataggggctgataatcagatcaagcatgtggttagaaggtctgaactttcaggttcccagtctctggagatgggaagcaggctgcagactggttcatcatgtgggcaatgatttaattaaccatgccaatgtaataaaaccccatacaaattctgaacgccaaagctcagcggagcttcctggttagtgaacacactgatgagctgggaaggtgatgtgtcctgagagaagagggcacagaaactctgtgtctatcctttataataaaactgtaataataagtatagctttcctgagttctgtgagtcattttagtgaattatcgaacttgaaggcattgtgggaaccccagaatttacagccagttggtcagaaaagtaggcagctgcagtggggctgggggagccttagacttgtggctgtcatctgaaataggagcagtcttgtggaagactgcccttaagctttggtgtctacattaactccgggtagtgtagaaatgaattgcagtatacccagtggaggtgaaaatggaatagttggtatcaggttactgaaacatatggtttgggaagagaaaggatgaaagggcaggggatgaagaacttctgattcctccatggccatggggtcacccagggtatgaaacaccagctatgctgcaatcagttattggaggtaaaagttaccagtgaaatttagagatgatgcatatatcttctggggaactggctcactaaatgcataggaaaatgcaaaacagtaagaaaaaagagaaatatacaatctcttggtaattactatctataatataatagctaaaaatgaaaggaagagatgaatcaaatataaattctggccagtctaaattatggcctctagtctcagggcccctactgaaggaatgaatgtgttgggaaagatattggattcttgccagttcaaggaacaggcactagcctcagagtcattttcaaaggaaaaagttatgctgaaacaaatcatgaaaaagactaaaatgatccctaagagaatagggacagacagagggaagtgtctagaaactcatccaaactgggaaaaaaatctttaaacagttattaagaaatacagcgcagtctgggcgcagtggctcacgcctgtaatcccagcactttgggaggccgaggtgggtggatcacaaggtcaggagatcgagaccatcctggctacgatgtctctactaaaaatacaaaaaattagccaggcgtggcagcctgcgcctgtagtcccagctactcaggaggctgaggcaggagaatggcgtgaacccgggaggcggagcttgcagtgagccgagctcacaccactgcactccagcctgggtgacagagcgagactccgtttcaaaaacaaaaaacaacaaaaaaagaaaatacagcaaacaaaactataaaaaccctggaagacaacctaggcaataccattctggacatgggaacaaggaaagatttcatggcaaagatgccaaaagcaatcgcaacaaaagcaaaaattgacaaatagaatctaattaaacttaagaccttctgcacagcaaaataaactatcaacagagtaaacagacaacctacagaataggagaaaatttctgcaaactgtgcatctgacaaaagtctaatatccaacatctataaggaacttaacaaatttacaagaaaaaaaacactaaaaactgggcaaaggacaggaacagacatttaaaagaagatatacatgtggccaacaaacatatgaacaaaatagagaaatacagatcaaaaccacaatgagataccatctcacaccagtcagaatggctattattaaaaagtcaaaaaataacagatgctggtgatttgtggagaaaagggaatagttttacactgttggtgggaaggtaaattagttcaatcattgtggagaggagtgtggcaattcctgaaagagctaaaaacagaactaccattcaacccagcaatcccattactgggtgcatacccaaaggaatataaatcagtttaccataaagacacatgcatgcgaatgttcactgcaacacctattcacaatggcaaagatatggagttaacttaaatgcccatcaataacagatttgataaagaaaatgttgtacatatagactatggaatactgtgcagccataaaaaaaatgagatcatgttctttgtgggaacgttgatggagctggaggccatcatccttagcaaactaatgcagaaacagaaaaccaattaccacatgttcacacttataagtgggagctaaataatgagaactcatggacacaaagagggaaacagagactgggggcttgagggtgaagagtgggaggagggagaggatcagaaaaaataattattgggtactaggcttagtaactaggtgataaaataatctgtacaacaaacccctatgacacaagtttacctatgtaacaaacctgcacatgtaccctgaacctaaaacaaaagttttatttggttgttttttaaagaaacgaggtgaaaaagcaaacgctgatgggggtaaaatgaaagggaaagagaaaggggagagtcaagggactcatcatagcagggtggaagtctgaaatcaaaacacagaggttgggtggaccaatgcggcggtcctgctagtgccccaacatttaagagtgctaagcaaatctgctttattcatcttagtttggaagaatttggaaagcagaaaggcaaagatggcaacaagaaacctgaccttcaattacctggagcaatggtctaccaatttaatcaagaaaaagattcaggaaagagcctgggttccttggctcaattctgagctggggacccaacaccttaagcacgtgagtaggcaaaatggacacggggtggagaggagaagactctagacaccttgacgcagaagtgccatgtactttggtccaaaaccccctggtgaagccctaaaggagactacaattaaattgagagggtacagaagtgcaagggttggtagaattaaggtgaaagtttgaatgaaaactggagagtttgaacagactttatgtgaacaggctgtgtctcctttacctgaatgtttcatgggaacagatattatgtctgaccagaacacctcccccacctactactgaaagtcctaatggggccgggctcacacctgtaatccgagcattttgggaggctgaggtaggcagatcacttgaggttaggagtttgagacccgcctggccaacatggtgaaaccccgtctcccctaaaaatacaaaaaattagctgggcgtggtggtgcatgcctgtaatcctagctattcaggaggctgaagcaggagaatcacttgaacctgggaggaggaggttgcagtgagccaaggtcatgccactgcactccggcctgggcaacagcgcgagactgtctcaaaaacagaaaaaaaaaaagaaaaaaaaaaaagaaaaaagaaagtcctaatgggagtcataactagattgagaagatatagaaatgcaagagctaatgggatttaggtgaaagttttggatgaaaattcgtatatttaaaacaagctttggtgttttttgtttgtttgtttttgttttgttttgttttgtttagatggagtttttgctcttgttgaccaggctggagtgcagtggtgcaatctcggctcactgcgaactctgcctcctgggttcaagcaattctcctgcctcaccctcccgaatagctgggatgccagctaatttttttgtatttttagtaaagtcggggtttcgccatgttggccaggctggtcttgaattcctgacctcaggtgatccacctgcctcggcttcccaaagtgctgggattacagatgtgagccacatctggccctaaacgagctttatgttaagtagttgtgtctcatttaccaggatatattatgcggactgatattatgtctgactggagagcgtttcctctattaaggaatgtgaaacagagagcatgtaaatccaccctttaagcaatattaattaggaatgcaaaatgggaatcaataagattactctagttcaacaggcctttaatatcaatcagtatatgaactagtatggatgaattctctatacaaaaacgctgggtagaatacagattggaacttacaggcgaaagcctatgaacacctctcagtgaaaattactgggattttggactagagaattcccatctgagaggcaattactagcttgctatttgacattaattgaaactgcccctataaccgaagaatagaaaataatcttgaaatctaatgtacccatagtatcttaggtgatactggagacacattctactaggaaaggcaatgcccagaagagtttcataataaaatgaaatgtattgagtaggaacacattactgggaaatgcaaaaagttacacagtgtattcatgagtctacctgctctgatggactttggaaccacttgagttgctgccagattctgttgacactcggacagtggcctataaacagctctcaattaaccaacaaatagctgcttggtttatgaatagcagttcaattgtgaacatacaacattttatttgtaaggccattcctctgacagaagaaggtgaaaacaaataagcgtggtgggctgcactgcatgctgtttgcctcaatatctgagtttttattaactcgcaggccatggtcacatggtcaggcaagaaggacagtggaaaactggcctattataggcatgcccatatagggtacagcctcaaggaacttactgtgggaatctgatgggtgcattaaggtatgtcgtatcaatgcctatggggagacttccccttcaaggttcaaaaggtgattggaattgacgagcaaatacctcaggatgcctgcttgaggtggccccctgggtatatgaagcaagtggacactgggggctgcagcaatgcagagatgaactgaatctagaaatgttcctctcaaaccctctgaggcacaaaataccagtaagaactttctgtctgcccatgacagactgcagatggctatagggcagattccctcagaggaaggccctacacatagctggaaacttggactcatgccagtagccctggatggctacaaaagggtcctgacatgaatagatgccgagtccgcactgggctttacttaaccagtggtagcctggcacatactgagggaactataaaagaaccagcagagaacataatgcattgatttggaccacctagtcacatttcgtcagaccaaggaacataccttacaatccataatgtccaacaatgggcagagagatatcttccccagagtaatggtttggtaaagaatcagaatggcaagttaaaacagtggttttctaaaacaggggaaagtatgaagaactggcttgcattaccagcatgagtatggattcatcaagagagaagcaaagagatatagattcctgcactagagagattccttttttttttttttttttttttgagacggagtctcgctctgtcacccaggctggagtgcagtggcgcgatctcagctcactgcaacctccacctgccaggttcaagcaattctcctgcctcagcctcctgagtagctgggattacaggtgcacaccaccacggccagctaatttttacatttttagtagagacggggtttcaccatgttggtcaggttgttcaaactcctgaccttgtgatgcgcccgcctcggcctccttttgtttttttgatggatctcagggagagggggaggagaaaggaggacgctggtatggcaaaacacttttttctttcttccttatatcaccttctcctacctgacaccacggtcccaagaccagggctaccactacaaatgccagaagcagagatggttcccaagaaagaaattgtaactatacttttaagccttaacatcaaaattcctaaggacctgataggatgggttgtgtcttcactccatctggagaatttaggtttaatagtgaatgcagctttattggctggtagcggaaatagcctgtttgctctatacaaatggataggagaaataatagctgagagtaaagaaatgaataaatgggttatgcaataagtaaaatattacattaatgcttcaaaagaggctcagagcaaaagaatgatattgtttcttagcttaattatagctgatacatgaaaagatgaagccatatattgctgagacctctcctgcctggaacttgacaaacttgaatggaatcctataaacctcagaggcctaaacttgaagacaacttggtcacagaacatgatgatggactggactaattattaatgactagtagaactctagtaatgcgctagtgtcttctgactcttactttacaatatggtataacactggaattgttggtaagagtataatactgatagtactgggaatggaattaaaagcctcctatctctacccaatattgattcctccaaacattaggcatattcatgctggtcctattgacaggaatgatccttttgccatatgggatccatggtcataggccagggggtggtctgtagtttaataaataatttgtctggtctttgtcctgggctcctggcaggtagcttcaaaaatgcttggaattttctgagtgatagaagtgccattattatcctaataaggtgactctggtgagcccctagatagcttcaggatagcggttggtcaccagaaagaccaatctcatgttcagagggttgagtactttcagccctccaccccattagcaacctcttgagaagaagggagctggaaactgagtgcaatcacatggccaatgacttaaataatcatgcctaattaatcatgtaatcaaaccccaaaagtattctctagacaccaaaactgaaagctcagtggagcttccttgttgaacacattgatgtgccaggaaggtgatgtaccctgattccatgaaggcacagaagctccaggcctcacccgaggtctaccctttttaataaaattgtaatcataaatacagtgctttcctgagttctgagtcattctaacaaattattgaacttgaggggctgatggggtccccaaatttttagccagttggtcagaaatgcaagtgcccttgggaacccccacccccacaaaactagtgctggcatctgaagtgaggtcagtcttggcaggcctttgtccttaactttttttttcttttttggagacagggtcctgctctgatgcccaggctgtggtgcagtggcgtgatctcagctcactgcaacctctgcctcaagagggctcaagctatcttcccacctcagcctcccaagtagctgggagtacaggggcgtgccactatgcctgcctaagttttgtatattttgtagaaatgtggtttcaccatgttgcgcaggctggtctcaaactcctgagctcaagtgatccacccatcttggcctcccaaaatgctgggattgcaggcgtaagccaccatgtccagccaacttttggcatcgcactaactctgagtaatcagtgtctgaattgaattacagtacattcagttggagtagaaaaagattaattactaacaagtgagattctccataagtcatcaatacggtgttacaaatttgtggccttattgtaaaatattcaactcaaagttccagaataccagagaactatggagaagtcttgaagaacctatatttgtcacaaacacttgctttgggagctaagctaagctcccagtctgagaatttccctaaactcttgagggaggctttcagaactatcctctccgtatctccagtaagccccctaatttttagagttagtggaggaaaaggcatacacgcaaataaggtgcagtctgtaaaataattttttaaagtagatgattattttagcattacttctaaagtgtttttctttttaggggctgcttagcaatgatttatctaactgatagttggggagatcagctcctgtaataaaacggggcagatatttcaagattaaatattttccaaagataatcaagagttgattttaagacagacagaacatatgtttgggtcaataggtaaatgaaaagatgctcaatgtaattaatcatcaaggaaatgcaaatcaaaccataatgagataccacctcaaacctgttaggctactgctttaagaagacaacatgttggtgaggatgtgaagaaactggaaaacttgcccacttctagtgagaatgcaaaatagtacagccactgtgaaatatattacgaaggttcctcaaaaaattagaataggctgggcatggtggctcatgcctgtaatcccagcactttgggaagctgaagtgggaggatcgcttaaactcaggagtttgagaccagcccgggcaacatagtgagccattgtctctattaaaaatacaaaaattaactggacatagaggtgcctgcctgcctgtagcccagatacttggaggctgaggcaggaggatcacttgagcccacgatgttgaggctgcagtggagcaccagtgcactctagcctgggtgaaagagtgagaccccatctcaaaaaaaaaaagttaaaaatagaactacccagcaatcccacatctgagtgtttatctgaaagaactgaaatcaggatcttgaagagatatttgcattcccatgttcattgcagcactgatcacaataatcaagatgtagaaacaacctaaatatccattgacagatgaacagataaagaaaatgtggtgtatatgtacaatggattattattagtcttcaaagaaaaaaggaaatcctgcaacatgtaacaacatggatgaacctgacggacattatgctaactgaaaagctagtcacagaagaacaaatattgcatgattccacctatatgaggtatactaaaatagtcaaatttattggaacaaaaagcagatccagttgccagaggcagcagggagggggaaatggggagttgctaatcaagggcataaaatttcagtaacacaagatgaattaagttccaggtatctgctgtctaacattgtacctatattgtattgtatgctgttaacactattgaactgtaccctgaaaaatctgttaaaaaggtagatctcatgttaactatttctatcacaatcaaataaaaataaatttcaatcctaaaaaaaactgcctggaagccactaaatagatataaagtattcattaagatcatgtaagtattttaaaatttcactatataaaaataaacttctggtaacttttgatgtaacagctcaatttccctcagatttatctccaaacttacttataatagttctggtcctcaccacatacattctaatttcgccaaaggagtgtctattgctcatacttctccacccctaccactttctttacctgtatattgttattctatctgcctggctttctctgagatattattctgtcaacaatccccactttctcctgcacctttactctggttcattctcagcatataaacaactctgctatcatcctcactaaaaaaaaaaaaaaaatcactattacaattctttgcctttttttaaccctaaactttgtgaaacaacagttattccagtttttacaactcctacccattcttcaacctatgacaatttgctattcaaccttactacattgatagaaaggctttgcctgggtcaccaatgacccatatattgccaaatcaaagactatttttagtcctcactctaagagtctatttttagtcttgacctcccagcagcactgttgcttctaactatcctctctgtcttgaaactcttatgtgggctacacataacattgttttctcccagttctcttctattttggaccattcctcattcttctttgctagctcctccttatctgacaacccttgatcttaaggttttgttctttgctgcctttttactataaatactttcccctgtatcatttaattatacagcatcaatcactatttaaataatgataattcatagttctctatttccagcctcaacctttccctgatgttgtgaagtaggtgaagttgtaaaaattgcaggagatattctattgaagaagcctggcacaaatgctgcctctgcccctttctctgtttcaccaaggcttctcttagtctcaatcgtaacagtgatattggtagctgctgtttactcttttgaaaagattgttgggaaagaaaaaaaacaagaagattattttgatgattctctttaagtaattctcaaattactccagcccaagattaataaatagagtaattttatatgacagcatatgaataggattacaagaaatgaaaagatagaaatggcataagagagaagtggcattgagtactcagcaaaaaaaattggacaacatatatagattataaaaatgctacaatgtgtataacatgaaatttaattccagaggattgcacttttaatacattattagcttttagtaaatcataggattttaagttggaggtcaccgctatattcaccaagaaaaatcacgttgcaacatttagttatcttctaaggttgccaattatgaaaaataaaaaaatactataatagaatttttaattaagtaggaaaacaaaaatgtaaaatttttgtctttcatttaaaaaatgctttgggtttggctaaatcctattattttcatagctatgcaaactaataaactttttaaacaatagcagccttccatcctttttctgactatatatataaaaagctggggatatgtggatgaactcgtctactttttccataactgtaagtgcatctgatctatgggaggctggtcctgtttttcagtgttaacatgtaatagaaactggcagaatgaacaactaaggagctgtgagttgaaatagttgcttcgaaacatgagtaactactccccaacttccagacatttgtttcaaataatcaccacactaatatcatagcatatctgtgcaaagtgaatagggagaagaaggcaggcaaaaatagcagctctagtacttaatcaatcaccaaaaggggtactcaaacccacccaagatctatttatggagcacctattataatacagagtactacacttgacacaaaaataaagaagctcccaaattaggaaggaaccagtgatatcaaatacagatggcacccttctaagagttaaatacgttgggtacttcagttgtgtttcctattgttagcatttacctctatttagccatcaataaatgctaatttttttaaaaaaggaacatacaaaatattttcccctcattttaagttctacaataattttattttagtcttttaagtttatatttacagcaaaacagagttacataattatcttgtttaacaaaaacttacataagtaaaacagatacttaattggcatataaattcatatttctgtaaatgttaataattctttctagctttaaaattctatcaattatcaatggattaaagaataatgaaatatgttccagatgtgaattaactccagaaaatttcagaaaatttcagaatgtgttcagttgggaacacatatactgccatgccttgctcaatgatggtgatatgttctgagaaatgtgccgttaggcaatttatcattgtgtggacatcatggagggtacttatacaaacctagacaatataacttactatgcacttaggctatatgatatagcctattgctactaggctacaaacctacacagcaagttactgtactgaatataatggacaactgtaacacaatggtatttgtgtacctaaccacgtctaaacatagaaaaaggtaatgcactatgacattacaatggctatgacattactcggtgataagagttttttagctccattataatcttatggtatatgcagtctgttgttgactgaaatgttactatgcagggaatgactgtactttattaaagcttttatctaaaatatgtggtgttgaataaggaaagcatagacaactcatagtgatcacagggactttcaatcttaagtttattgaaaacaaaaatctggcttccaaattactattattttcacaatttatagttatcttaattctgtctgccatctggatactatattattccattctgttttcctctttcttagccaaaaaggaagtcctttaaaaaaaaattaccaaaagtcttctctcagagaaggcctaaatgaagagatagaaaagctctatttaggagagttatatttcctgccagtataagaggtgctattatctgaagtactgaaaattaaaaattaggacagtttctagttcatgaattaggtcttccgtggtgtgaactaacaaaattaacattcaagtcagattttttggtaacagtaatgtacagtgtttcatgatatatattaacagagagaaacagttatttaatatttaatatttttcactaggtttttgggatcactcactcttaactttcctcttacctcactggctcctcttccttttattcatccctaattactgatgtgctgtgtttggtcctcttctttgtgtacacttacttcccactgatttcattcagtgttatggctttaagcgctagcagtataccaatgaccaccaaatttatatctctagtcccaacctctctcccgagccttggacttgtttatcctattgttcactctcatccctgcttggctgtctaagaaagatttaaacataccaggaccaaaataaactcttggtttgcagaccgaccccctccaaatgacctccttctctgtcttccaaatcatttactcaggataaaaacctacgataacatgcttgccttctctctttcctccatgcccacatcttcaccatggccaagtctctacatgatctggttcctgcctatctccatgttgtcctctcctcccactctctacctagctcattttgacccagtcacatggccttctggcagttcctttaacatgccagttactctcacctcagaatccttgcacttgattgtctgtcattcccctgctccaccttcacaacgctttattctctcaccctgcgctagttttcttcatagcatgtatcattacctgacaatttattatatatttattaaattttaatttttatttgctaattttgttcaccattgtatcctgaacttctagacaagtagttgccacatagtaagcactcaataatacttgctggatgagtgaatctgtgatacacatatgccctaataaaacggtttcattgtactatgtaacccaaaacacctgacatacttatatttatttataactactaatgtggcctagatttttaaacagaaaatttaagttattcatacctttctttcaattaacttaaaatatgaatttaaaaatataaacaaattaaatagttcaatgaagtgcaatatttactatgttaccaaatgaagaaaaagggaatatttaaaaagataaaaaacttaagccttaatatacagttttaggaccacaacattaagttcaaactctctaccaacagctactgaatatataaagatttttttcctgattactgatctttgatgttgtgacaatatctgtttgttctattaactggatatagtatgacaacttcagctgcttaattaactcatgttttgaaaacaaaatagaaagctcataattctttttctataaagctgatgtactggtagataagaaaatgtaagttaatttgtgaaaattttatagtgttaacaaatttcatatttgacaggaaaaattataaaaatatacttacttttttcatcagctttgtctcttattgctatggtatcattactcaaagacacagtctgtgcattcagaatatctgttctcattccaggaaattttggagatgaaataaagcgcccttcatatgaatataaatagatactactaccatctacaagaagaaaatgtctaaaaaataaagaatagaaatagattctcaaacaggagtatactttatttttgttttcatattacagaatagtttatccttgggaaaaaaaatctaaatcttacaattaatgtaaatgtgtagatatataaggaacaaaacattttaaacactgaaagccagcattggttgttttggtttgttttctgggtttttgttttatgatgaagtaggagaagaaaaatgaaaatgtccataatcaccaccctatacactaaaattctgacttcttttacattatacccacaattcatttcctttcctgaagaatattctatacaaaggcaatcaaaaaatcgtataatttacaatatagtcattttaatgccgggtgctatttgtttcatgaaacagtcttaatatatattttataactaaagattatgctaaaaataattaaagattaactagtggttaaagtttaaagcagtgaaaatgactaaaaaaattaacattagggcaagcatttattaaaataaggcagttgtgactttaaaatcatatggtgactatcagtatgtattcatatctaaaaacacctatttttttgccacagggtcagattcatctgctatgctgacaaccatatttaaggcacagggctctctgtagttaattttttattaactcaaaacataaatattttatggctgttatatttttcctttgaaaatttatgaatattgtacaaaataattcaagcaatacagagaaaacaaaagacctcttgagatcctacctccatagagataactatggcaaagtatgaacttccagaactttactaactcactcattcctgataaacatgtttcaaattattcactgttttaaagaatgtctacagtgtatatatatctccatatgtctgccctacttatttccttagtacagcttctagaagtgcaattactggattaaagaccatacatttaaaatttttaaatatatcttgttttattgccctttgaaaagttgtattgatttacacacatactatggctatattggtgtgcctgtttccttcatgctgaagacattattacttttcaaaatcttatgtttaatgttttaaatatccttgattcagaactggttcttgatttaggaattgctaaatgttctttttttgctatggaaacaaaacagaaataaatgccaaaaccaatgaaaaattagtgtctaattaacaccaaccacatacacttcaattaaattaatacttgagggttggtaggtagtttatttaattgaagggtttggcccttacatactagtgtatggtcatacatattggtttatgaaaacaatatttgctaaacttgacaaagtgacatatattagtatatattcctttgtctcagtctaaaagcattttattttccaataacacactatggcttttaacctatttgtgagtaaacaccctgtttgaaggggcaaacatctctatatacataaataagaccaatgataggcagtaactaaattttttggctatttatgccattaatatatgtctttattaagagtatattcaataaatacatttataaataatgtataaatgaatttatttcgaactgttaaagtaaaaagcatttcagaaacatgattttttagatagctgatatcttaccttttaaatgacaaaaatgacttattttaaaaaatttatgatgtaactaaataattgatacatttcaatttcattaaatagataacataaaatttgatataacattttcttggtcattcaaggtcatcaatatggtgatcacatttttcaataactatttaactgataactttgatactcataagaatctgttggtgcacagaatcattatactactcagctacacagttctgtgcttttagttttctccatgttcccttgccaggcagctactttccttcctgtcattgtgccagtctctaacagcccaccagtaccattcttcttctggttttctatttataaaaagctgtgggctagaaaacctgataataaacactattaagagttgcctacatgatgaggaatgaggaataaagcacatggttttggtgcaaatattttatgggtagatattttaggtaactgtcaattatattttcataatttttaacaagttttattgggttgtagctgtctaagtcctcctctgattcagtaggctatcactgtactcaagagactaattgacagttttcatggaaaagtgtaggttcttgagtaatagctattcctaatttactccagttaattgcctggcatttcttagtcctgtatacactgaatgtcttagtagagaaaactagttttcaaacttcaggtcacagaccagtaggcccatgaaaccaaagagtttcaaccaatatttaaaacaaagcagaaaagaacagaatagaaaataggaggactatgaggtaaaaactctttaatagttatttacctgtgttgctctcattctctcatgtcattactctgatgtttacttgtaatgagtttattctcatcccttaaaataaatagctttaaaatttgttttaatttctaatatcgtaaatgctgatatatttaatccacatataaccctgaataattttctaagactgttaagaaattcagagactaaaatgtttcagaatcactgatttaaataacttatttattcttttctttttcttctaaaatgtaaaatagaaacagattggttctaaatgactagtataccattcttttaattggatgtttttattaaagagtgctttaatgctatttattttaaccccagatccagtagttaaacataataaattacctttctgcctgcagaatcaaactaacagttccttctttgagatcaaatataattggtgtgttccagttcttcgtgctaaaagacaagtaaaatggatatttattaacatttaaaataccaaatacttttaaataagtagattggtattcattttaaataaagttacttcagtttcatagcaattatatacatacttttattacagcacttggtgcattgttctgaaattattcacttatatgtctgtatccccaactaaaaagcagagactctgtattcccagcaattagcacataataggaatccaataaatgtttactgtaggtattacaacatgcgaactgaggaattctaagtttgagttctgccatgtattggctctgtgagtttgggcaagtcatctaatgattctcattttaaaaacagtagcagcatggcataatgaagagatgatagctttttgttagacatatctggattagaaatatggtttcaccacctgtcagccacttgattttttcttttttttttttttttttgagatggagtctcgctctgtcgcccaggctggagtccagtggcacaatctcggctcactgcaagctcctcttcccaggttcacgccattctcctgcctcagcctcccgagtagctgggactacaggcgcctgccaccacacccggctaattttttgtatttttagtagaggcagggtttcaccgtgttagccaggatggtctagatctcctgacctcatgatccacccgcctctgcctcccaaagtgctgggattacaggcatgagccactgtgcctgcccacttgatcttaacaagcttaacctgctaagcattagcttccttatttgtaaaatggggataatgatgacttacattttgtctggcaaaagacctgttataaagcaggtaccagaaaaacagaaactgtaataacagtaatatgatgaacatgattatttttcctgcaggcctcccaatgttattgttgggttgaaatgaaaagatttctgtgaagcattctgtaaactctaaaatactatataaatgtaagccatgaacatgcttattgaataaatggattaataaatgaacaaacagatcattttgtttttatagggtaacatgaatcaaagatcggggtgggtaaagagaacatttacaaacagaaaaacccatccttaaataataaaaattgttccacagtttaaaataagttttattactcctatatattctgaatttctcagtaattttcataaagccaattctctacctcagattaaatcccacgttcaaatccagaagatgaaggagggaaggggaaggaagcagtgagtaagcaaactggtaggcaactaatcttggctaatgcaaagaatctgataatcatttcagtaagtaaatacatggacaaagcaaaataaataaattactgctaataattagtgattactaattactgatttagtaattattaattagtctggggttcatagatatgataaagatatatgcttttgtactttagaaaaaaatcacaaaatactttattaactaaccttcattctttgtcaagagggttggtaagaaaagtagtgattatgtgagggtttaatatccccttagaaagtatctgagatttctgacaactgagagatatataaatgccatggaaacataaactccctaagctataaatgctgaataggacaataatattttcaatataattatctgaaaaatcaaatgaaaatttaatgtagaatgcttatatattgttttctttttctggaacttcttttcatataaaccagtaaattacttgcatgtctgtttttaaaattatatttttattactaaaaaatagccaacagttattaagaacttgtattcaaatccctgctttcctttagtaacaaagtcaataatctgatgtaaggtaagttatctaatcattctctatgtcctttagcttcagctttcaaatgagaataataataaacatgaaagtataacagttgctcaataagtgatagtcattattatctaaaatgctagtagatttttaaaactttatgaaatatgttttggtggtgattcattcccactactgcatccttgcatttcattaccactgctgcatcctggtattaatattttgtaccttaatatgtgtaccttaataatcttgacatcaaaaaggggaggcaaggttcaatcacaaaagaagaaaagcaaccttacatttgccacacattaacttgtaagggaaaagtagagtgaccaaaaaaattaacagctgctaaactttggatatttttaagcaacttctctaatacatgtaacacctaatgatactaatcctacagattcaaacattatgtccttgccactataactagtagaataatggggaagttattatggggaagttaagagccttacctttcttcaaacaaacactgaactgaaaagatctctgttttcccctgccccatgaaaattaattattcaaacatctatctgcattaaagtgactgtatgattttctcacattctataatcccttccccacatctcaactgcttaacttagtatcttttttgaatcttcccaaattcttactgttcctcttttgctctcatgtaaggaaaaaaaaaaactcacataaaattaaattgcctatttctttatctactcgcctctgtttcttctatttcattattccagatttggctatttgtcccaaattgcagattctgattagtagcaggtttacacataatgaatgggaatttttaaatatatagttgtagcagttgttatttaagttaaatacctttgtgttgtgtactactagacttggataccaagatgatgctatactttacatattttaattcatttattcattcaaaagtatttattaagtacccacacgttgggcactgtgctaggtgctaggcatacagtggtgaatgagacacatatagtctccatcctcaattttatattcaatgactaaactatacataatgttataaatataaggacaaaatttttaaaaaatccttaactatttctaactcttgaaagtattatagtggttatgtgagttttctggatagttgaggaatcaactggtagtatgctagagccagcctgtactagttattaaattttcaagaattttgtaagccaactgttaaataaagccattatttattatttgagacagggtctcactctgttgttcagactggagtgtagtggtaggatcacagctcactgcaccctagacctcctgggctcaagcaatcctctagtaccagcctcctgagaagttaggaccacaggtgcgcacctccacacccagctaattcaaaaaattttttgtagagatgcggtctcactgtgttgcttatgctggtctcaagcccctgctctcaagcaatcctcctgctttggtctccaaaagtgctggggttacaagcatgagccattgcgcctcgcttgtctattaactgttgatgtacaaacctcgttagatctattttcactgctctaagttcactttctctcacttccgggtttgaggtagttcaggatagctgaggttttgagaaagttaagcttaaaccaaaccacgctgatgtgaaatcctgaaaataaactcctcagcacagacagacaaaactctgaaattttaagaaatgcaagatgcttacgagaacacgtaacattgaagagacgttgaaacaactaagtgtgcatagttcaaagatgctttaatgactctatcacggaattccagtaaatccactgcatcattaagaacattacgaacctaaacaaggaaaaataaaataccaataaacattataacatatccaaattttatttagataagttagcaagattttgaaacacaaaaaattaaatgcactactgattacctaatcatataaaaaagaatttaatagaaactaggcataagatagtatacctaatattaaaaaaccaactgacaaagcatagatacagaaaatctcttagaaataagaagaaaaagacctactgagatttctaacttgcaagccaaacttaatgatgtagcaatggagtgatataaaaaatattccaacactgagatatagtcaaaggagggtggcatattgaagttggaaagattctatgtgatttctgcccaaaatggtaagaatatctctttttggtgttagattttactttaaaatatacattctaaaagtagagacataattgctttaaaaatcaaaagtggggtaggaggtattggtaaacaaaccaattgcatggtgaagaagccaagctgcagggagtggggaaaggtatttccatatgcaaaaacacaaagacagtgtctaaaaaagccaagcagcaactaacagagagatttgcttatgacagtcagatttatcataaaatttgtaacagactattttgcaaggattttaatatttggcagttttggaaaaaaatcttgaagttgatgaacaaactgcaagaaattaagaaaaatgttgagcaagttaaatttacgtatctctggtcaataaaagaatgggaatggcagtatagttaagaggaaaaatataggggaaaaaagtaattatacctagaaattagtactgctttaagttctcctcaaaatgttaccatttttctaaatataatgtgacaattataatattaatgaacaatgaaaagtatggaaagaaaaatagaaggtaaatcaaacttcttataagtacttcaaagaagtacttaggcctactaggcattgccatgatctaaatgtttatgtcttaaaaattcatattttgaaacctaatcaccaacatgacagtattagcaggtggagcctttggaaggttgtgagcccttatgaatgggattggtgttcttataaaagaggacccagagagctgccttgcccattccaccaagcatggacacagcaagaaggcaccatatatgaattagaaagtaggcccttgccagacactaaatctgctggcaccttgatcttggactcccagcttccaaaactgtgagaaataaacttctgttgtttatgagctacccagattatggtattttgttacagcagcacaaacagaataaacaggtatgttatgtctttttactatctgctctctaactcccatctccaccaaaatattgacccagcaatctcatttctagagtcccatcccaaagataaataagcaaaactataaaataacatatgcacagactatcactacagcactattagtaatagcaaaagactggaaatagcctaaatgtctattgataagggacaggttgtataaactatgatatagtcacacaggggaatattatacagctataaaaaggaataaggaagatctatagatgtccatgagatgtagtaaagtgaaaaaatgcgctaggtgtggtggctcacgcctgtcatcctagcactttgggaggccaaggcaggcagataacaaggtcagatcgagaccatcctggctaatgcggtgaaaccctgtctctactaaaaatacaaaaaattagccaggcgtgatggcaggcccctgtagtcccagctactcaggaggctgaggcaggagaatggcatgaccccgggaggtggagcttgcagtgagctgagattgtgccactgcgctccaggctgggcaacagagcgagactcccatctcaaaaaaaaaatgcaagatgcagaacagcgtgtatagtatgataccttttatctaagaaagggaagaatatgaagatatatggatttgctcacatttaaaaaaaaaacaagaaatcttaaacagtattcagtaacatattattagaataatattaatattgttattttcaaactatattttaggatataatgttttcaggaaccaaaattttctggtcagagagagttactcttaaaaaatcaagagtaaaactctataatcttaaatttaaattagaaacagcataaactcgtgatgtattttcatcggtcaaaaacaaaagcatttcttcccagtgtagactcaagtaaaaacgaaaaaaaaattttatctagaagtaatgatcaaatcagtagcaatgaacacacgttatttacagatctgattgtggtctataaataacatttccttccaaaaggagcaaggccctcatggaaaaatggttgattccaagtctagatgggaaatgtacaaaagaagcctgaaacatcttgtcacatcagaaagcaacgaagctattgaaatcagtcaaaagaacataggagccaactggccaaagatgagacaatttgagcattaaagagaataaccacgatgggttgaaacacacagaaaatgttaaaatctacaagtttatcatgataacatcaatgacaagaaaaaagaaattcactgggcatgctaggaaaccaacttattacttgaaaactggcaaacaggaaaataattcagcatttgttaccattccccacagggtaatctaatggttgaggaggcaaacaaagtcttttataggagaattctagctaataaatgtggaaggaatcacagaattacaatgttactatttcacaacccccaatgaaaaataggtctaaacaactatcattaatggcagctaaaaacattaaggtacaaaacccagtgggaagctatatgatagatgaatcaggtttataatacctgaacacgctgatcaaatcttaataccactaaaagagagacaagcagacatatgtgcctcctgatgtgatgcaacaggaagtgcacagcatcacctaaggctctaaacccaatgaccagtctagaggaaacacaggataaatgaacatattaattgtaatcaaggctgggcatggtggcttatgcctttattcccagcactttgggtggctgaggtgggcagagttcgaaaccagcccaggcaacaaggtgagaccctgtctctacaaaaaacaaacaaaaaaaattagctaggtgtggtggcagacacctgtggtcccagctactcgggaggctgaaatgggaggatcgtttgagcttgggaggtcaagactactgtgagccatgactgtgccactgcactccagcctgggtgataaagtgagagcatgtcttgaaaaaataaatacataaataagtaaataaaaataaataaatgtaatcataccacaaagatggaatcagtcaaatacagaatgtgggaaattcaacagaataacctgttcctttaacaaataaattgtaagtaaataaataataagaagttgtttcagatttaaaaagacttaagagacaaattaaatgcaatgtggggctttatttcctgataaaaacaaaccaactagaaaaatatatttagaaaataattggagaaatgtgatctgttactgtagaaagacgttaggaaaagactggggaaatgcgaatgttactatggtaatgttaaaatgaaaatagttcttatctttcagactgtttaaaaagaacttaaaaaacaattccagaactagtgacaaagaaaaagacacgaatatttttgctcacctcttcaaggagtaggaggaatgactgtaaagaggggagtagtctgatgacaagtttcaaaggagctagagttttttagggaagaggaggttgtagtggtctagaatcagcaggagtaaggaagacatctaaccagatccagcgatatgcagcgcatcaaagaaaaacacctctacttgagaaggctggaggaaaaacactgctctcagtagtcaggtgttgttttttgtttgtctgttttgagatggagtctcgcactgtctcctgggctggagtgcaatggcgtgatatgcggctcactgcaacctccgcctcccaggttcaagctggggctcttccgcctcagcctcctgagtagctgggactacaggcgcccgccaccacacccggctaatttttttgtatttttaggagagacagggtttcaccgtgttagccaggatggcctcgatctcctgacctcgtgatccacctgccttggcctcccaaagtgctgggattacaggcatgagctacagcgcccggccagtagtcagctgttgttaattagaacaagaatgctcttagtgaaatggctgagctttgtctgcaaggccacagctatatgactgcaggttgtgtagtgcacaactctgggtctatgtgaatggtgccctctggaactgagcaggccgctgactgcaggtggtgtcttcaaatttcctaggcctacaactacacatatgaagccccatgtagcaggtggctgtagatttttttggtctcctttcaggatggagagaaaggagctacctcatagacccccaggctctgatttcaaacagacacttggatctagtcccttgtctcacttcaagtattaatactttcagtttccttagccagcaggagcaactttcctcactgcctttccttgcctgcttctggacctgaagtaggtctgagactccacgctgtatttttgttctgtttctggtccacagagatctttatcttgtgtttgagtccagatgagtcttatatatatataatatatataataaatatatattatatataaatatataatatatatatataataaatatatattatatataaatatataatatataatatatataataaatatatattatatataaatatataatatataatatatataataaatatatattatatataaatatataatatatatataaatgtatattatatataaatatataatatatatataataaatgtatattatatataaatatataatatatatataataaatgtatattatatataaatatataatatataataaatatatattatatataaatatataatatataataaatatatattatatataaatatataatatataataaatatatattatatataaatatataatatataatatataataaatatatattatatataaattaatatataataaatatatattatatataaatatataatatataataaatataatatatattatatatattttatataatatatattttatatatattttttatatatatttaaatcttttggtgccaaaagtatgtctcttccatgtatgaattaacaccattttcacgagaagtctgagctctcagagatttttttttttaaagatccaaaatgccatcttctagaaacagtttaaagctagtagaatgatataaaaactttaaagggaagttgtatgttagtttctttatagcaacatgctatctattcaaactgcctgcaaactttcctaaacaaacaggtttaagaaaattcaacatttaaaaatacaattaattgtagaggcctctaacattattaaaattatagatagatttcttaagatccatatttccctaaagcctcacatggaggaatgtccctttttgtgaatctggtacacttgaaccaaaccagaataaagcatcctagccataataagaaaactaaaggcactctagtaattgctgttatagtttcaaaactatggcaaattccacatcagaaatgttctgtgctgaattttttttttttttttttgagacaagagtcttgctctgtcacccaggctggagtgcagtggcgtgatctcagcccactgcaacctctgcctccagggttcaagtgattctcctgcctcagccttctgagtaactgggactacaggcacaagccaccacgcccggctaattttttgtatttttagtagagacggggtttcactatgttggtcaggctggtcttaacttctgaccttgtgatccacccgcctcggcctcccaaagtgctgggatgataggtgtgagccatcgtgcccggcctctgtgctgaattttaaaatacacctattactctgttcaactcagggcagctccaggattaatttcctgatattcgcatcacctaattcttctatatgatcacaatatttagactcctcagattgacataagtctaaacattctgtttgcacatttgcaaaacactcatttaatcctatagctataatcataatcatagcaatagctatcatttttgttttacatatattatctcatttcatcttcaatattactctattattagctcttatttttacaagacataaaatgtcctgtaagaattaagacacttttgaactttgatgactattaaaagccaaatttataccccatcctaaagttagagtggcaggagagaaacaaaggtaactttgggacactagaaatgcctcaccctttgtacctgcacgctttccctcctaggcacttccttctaacagagacatcaaggatctcttttggaaagaattatccactgggctgcttcctggaggcaagaggcagattaagaaactttttcactacaggctatcatgtcccacaaaagctgaggttcagagagacggtagggcaaataagtctactgtaggaaaacagcaccagcaggtcaaggtgtagatttaacaatcatgactcaacatgatctctggtttctgagttaatgaaacacggataaaccaaaagccaaagaagcctctaaggaaactgtaaaattctaagttgggcaaacaaaaacaattgcgattgtttagtctcactgaaatcctgtgactccaccttgcaacaaaagtgggctgttaaaaagtacagccctcagaaagcgaatcctcccaagtgtccagagagatcttcccagaaaggcaaactagagttaacaaactgaccaagcaactactttgttgctaagagagttctcaggatattcttggtgtaaaaccaaagaaaatgactggaggcgagcctcaatcaatttataggtttattttgccaaggttggggatgtgcccaggaaaaaggaacacaaaatcacaggaacatctgtgatccatgctttttccaaaaagggtttgaagagcttcaatatttaaagggaaaaaaagtgggcaggaggggaaaaaagaaggaagggagggagggagggagggagggagggagggagggaaaaagagagagagaaagaaagaaagaggagggagggtatggtcacattcttgtgaggtttagattagagctcactgaatccacatgttgcaagtgaaaacaggtacagggatagtcaactatgtattccccctgcagtgaatctgaatttttacataagataaacacagagcagaagaagcagtgaaatatgcattgtctccagtgagcagagggatgacttctagtcttgtctttctcccatacctgtgaagataagctgttaatttacattgttagggtgaaactcaacagaactctgttttagggtaaagatcttggggcctacagggaatttacttgtgagcatattgtaagggaagccctctggggaggtatgtgttcttctatctttgcagctacctacttaggaacaaaatgggaggcagttttgcatgactcagttctcaagcttaccctttccctttgacataatgagtttggggtctcaagatttttattttcctttcacactcaccagctggattttagctataaatgggtaatcactgtgtgttgttttcctttctccccttttccaaattgttttcattgcagccaccctcttttccctttgccattgtaaactgggaatatggagagtgggaggggaggggagaagaatcaaaatacatatttatgtatagttttccaaaccagagagttggagctggatgcaataaccatagagtctaggttatcttttttttagaaaggggatgggtttgttttcaatcacttataaaatagctgcatgataaagtagtatatttctgaatcatatgtataagagtaggttgaatatgtatccatatatatgaataaaggaagcttgtaaggtgactcccaatgatccctgcctcctggtattcaaacccttgtgcaaatctctccatttaatgtggtttggacctaatagcttgcttctagtaaatagaatatggcaacagtgatgagatgtcacttctgagctcgggttataaaaaactgtgacttatgtcttgcttgcactctctctggcccttcctgcttgctctgctaaagcaaaccaccaagttgtgagctgccctatgaagaggccacatacaaagaactgaaggagacctccagtaaatagtcaagaaaaaactgaggccctcaggtgcaaatgacactgatgaactgaatcttgccaaccatcatgtcagtgagcttgaaagcaaatctttccccagttgagccttcagataaaactaaagtcctggtcaatgccttgcttgcagccttgtgagactgtgaaacaggggagcctgttaagccatgcctggattcctgactcacagaaaatgagagataataattgttgctgtttaagccactatgtttagggttattcattatgcagcaataagtaactaacacagtacagctgctaaacagctcaaggatagactatagcatatatctatctatcattttttgtctgcccagaatcaactgacatcttttctcataaatatacattgattttcctttaggaaaccattccttccactcttctcagtgactggctagatgggattgactcattttcccctgcctctccctgactaaatacacttgactcaggctcagcatatgaaatccaaggctgagatttctcctggaattactagggaaaaaaaagcactctttccgctgaacttggagttggtagaatgtcagcctggaactaccaaggccacaaaatagagcctttctgaaaactaagacaattacagagaaaagaagagttgaggaagagaaagagatgaagtcctcttggcattatttaagcctctgaaccaataatgcctctaagtcagtctgtctcttaacttcacaagaatcaataaatttcctttttttctcttcatttttcactttaaatcaattacagctgaatttatgaaaaaaacattttcaagataataatctagggggtccataaaaacaaggaccaaatctgtcttgttcacttctgtattcctcattacttagcccaatgcctggcaagtagggatcactcaatagatacccattgaattagtgaataaaatcattctaagaagaaacatgaataggcctaacttagcaaaaatgcagtcaaatgttttataatcatggagaaagtaaaacctctttaaaaaaataaaaataatgttctagtttaaaactttaaaaatttataaatattattttaaacacaaagacaatttagattagataagccatttaagcatttccacggttcatcttatttcacataaaaatcctccatcactaggataattccttcttattatgaaagaagaactcctctttctagatatggtctcatgttggggcatttctgtaattaaggctaaaacttattttagcactactatattagctataaatataatattataccccaattagttgattagaactcacaatggattctatgtcatatacagaatattataatggtttagatcccaggttaattagaagaaatatacattaaaccatcatctagatcctacatccttcttaaaggaaacacagaagatagagggacatgtcaaatcacatgatggagatacaatcagcccagtccagactgagaaactctaccagacagataacttggttcttcaacaaacaaaatgcaggacagaaaacagagatagaaggggactcttcagaccaaaagagacttaaaagatacatcagccattgcaatatgtaaaactggatcctgattcaaacaaagttttgtggcatgtaggaaacaactggacatttaaacactttgtggatatttgataatattaagaaattattattattattatataatatgataatggtagtgtggttatattaaaacagagtccttatcttttagttatatatactaaaatatttataaatgaaatacaatgtctgaatttggggagcaaggaaagtagataggacatggactgggcaggcttaagcatgaactagtgattactggggctgggtgatgagtacatggggattcagtatactagtctgtgtgtgttttaaattatctaaataaaaagttttataattttaaaataaataaacagaataaagaaaaagtataatataccgaattattagtaatctagtgacaatattatccaaattttaaaatctggatatgtgggctaacagaatatttgaatagacctgcccatgcttctaaatttttatagtaataatatgaattatgaatactgaagatagaggcaattgatacaggcaaaaggaataagaggaaggtcgaatccttctttttgaggatttgcattggcacatggtactttgatcttctccttgtacctttcttcaactaattattaatatattaaaggcaaggcactgggctagaggccctgaaggagagacaaagatgagccatgaagatacttgtgccctcccactgatatcctttgacctgtaaaacatttctccccacttcccactgccacatccgaaccttcttgtattaatctacaaaatatttcacttcaaaattttcttctgatgggactgaggatacactataccaaaatatggcactatggcatactgaatattttaagctaaaggaatttgataaaacaagagcagcaggaggtcagtctgaccttcctctactcttcttccctaatacaggtcataaaacctagaaaggattttctgaccttttcctgaagcaggtcataagactctcatgtgagaggtgccctccctatacccagaggaaagttatatccttatttctgaagacacagggacacagagaagaatctaaacacacaggtcttgctaaatttcccccagcttattaccactagatcatactttttttgccctattgtgtatcgccacaactgtctactcttcatcaaatgtagcgtaaaagcacacagccttaactgtttcttcaggtctacatttcctcaggaaggctccagtgtcatgtaaaacttacattaaatcaatttatatgattttttcttattaatatatcttttgttatagggacctcagtcatgagcctaggatgggtagagatatttttcttcccctacacttcctaattcccaataagaacttcctataccattttcccattttgactctccttaggtaattcttaaaataaaatttaaaaaaatcaggttaaataagttcatccaattacaaataagtaaaacaattaaccctgtcagtaactggcagattaggcctgccttggattcagctccaggagtcaaatccaacatgctcctgtttgttacagctttttctctccttccctcactgaatccacatatttcctccaggtttccaatttcactgtatttgtcctaaatgcataactgaagtagctttgggcattcaggttctatatctgtgaaaggtttttatgtcagagaaagtgactaatggaatagttaaaatatttctaatgtgactgaatttttataagcttgactaaatataattaatgaagataattccatattctgtacagttaactaatatgaaaagaagcaggtttaatcaaccttggaacataataatacctgcatggctcttcttttcgttaatgttacttgaaaatttttccactcccaatgttgttccaccacatgtgcaaaaacgacatgtccatttccacaggctccagcaatctgagtgccatcgatagaccatgcaatattaaatatgctgccagtgttgggtttttctaatgcatatgaccactgggggagaaaaaacaagaaaaagatggacttactgaaaaaaaatttttaggaagttttaaatcaggcacatgacaacgtaataagatcatttttaaaagaatgtctattctggaattattatttttcttaataaaattatagtgtactgaatggaaaatacagatgtaattgttgaagtccacagtagaacatcatgctaaaacagtgtatgaaatatctcaagaactgtaaaaaacccacatcatctcaatgtttactattccttttaagtaataatacttaataggtaaacacaaagattctgtagaaaaaacaaagacatcttactattcattcctaatatatagtctctacatctaaaaaaatttctcattacaatattttaagaatgtcacaaaacaattgaaactcaacacacaatgtaactaaaatagctctgacccacatcttaaatcatgaaattacacgaaactggatctatttcttttcttttttttttaacagactgcagtgagtataacctctcctagaacctatctaactgtctgagaaagttatctagagatatcaataagcattaaataggacaaaagagattcttgtgtgtgtgtctataaataagacataagaaaaaaacaaactttttaatacatggtattatatgcacttgtttcatttttcagatgcaacatatgttatttgctaggatgattaatttgactaaacttatatacatattctcttttcattcttccagccttacagcgtataatcacagtcttgattttgttgttgttgttgctctcggctggatatatatacatatatatattttgtttgtttgtttgttttacattatttttttccagaaatactcattattagctacaggctcactttgacaacaaatctaggggaatggaaaaatataaagatttactaattgatgctattacaaaacaagactttaaaattcctaatgaaagttcatacataacataaaaatactgaaaggctcttcaaccactcactgacactcttttacaactctccccaccctccaactttggagccactaactgttgctttaatggcttcagtaaaggcctaataataaagttaccaaggagaagataatgaacaaaccataacctttgcttcatcagcagtatgaaaatactagaaacttccttttagaaaattaagaagaatcaattaaaaaaatacatataatatttgaagtcatcttttgaaaataactgtagaagactgggaacttcaaagatactaataacctgctttgggcgataaaatgaaattaattcatttgtgtttgacaaacaagaattatgaaacattacatgaatactattttacataaagattaaaagtggttgataatgacaaataagacttgatatattaacatataggcttatggcatctctctctctctttctaaatctagtctatcctcatggtgtagaagaaacagagatcttagtttaatttctattttaaaaccatacattcatataacagtccttccttaaccatggggataagtcccaggatccccagtggaagcctgaaactatagaaggtgctaaaacctatgcatcctatgtttttttctatatatacatacctatgttaaagtttaatttataaattagggaaagtaagagattaacaatgtctaataatacaatagaacaattataaaaatataccatagtaaaagttatgtgaatgtggtctctatttctggaaatttccatttctgactgcagttgacagagggtaactgaactcacagaaagagaaactgtgaaaaagggaggactaccaaatttaaagtatggttttattttttatttttatttttttatatgtgaaagattcattttattatttaatctgtgcataatttcaaggacattgatggagaaagatgctctttcaggacagccaagaagtatcaagttaggccagcagttgccctgagcatgcttgtttaagaaaggagatctgacagtagaaagggtcattgtcagcttgttatttatttatttatttatttatttatttatttatttattattattatactttaagttttagggtacatgtgcataatgtgcaggttagttatatatgtatgcatgtgccatgttggtgtgctgcacccattaacttgtcatttagtattaggtatatctcctaatgctatccctcctccctcccccgaccccacaacagtccccagagtgtgatgttccccttcctgtgtccatgtgttctcattgttcaattcccatctatgagtgagaacatgtggtgtttggtttttcgtccttgcaatagtttactgagaatgatgatttccaatttcatccatgtccctacaaaggacatgaactcatcattttttatggctgcatagtattccatggtgtatatgtgccacattttcttaatccagtctatcattgttggacatttgggttggttccaagtctttgctattgtgaatagtgctacaatcaatatacgtgtgcatgtgtctttataacagcatgatttatagtcctttgggtatatacccactaatgggatggctgggtcaaatggtatttctagttctagatccctgaggaatcaccacactgacttccacaagggttgaactagtttacagtcccaccaacagtgtaaaagtgttcctatttctccacatcctctccagcatctgttgtttcctgactttttaatgattgccattctaactggtgtgagatggtatctcattgtgcttttgatttgcatttctctgatggccagtgatgatgagcattttttcatgtgtcttttggttgcataaatgtcttcttttgagaagtgtctgttcatatcctttccccactttttgatggggttgtttgtttttttcttgtaaatttgtttgagttcattgtagattctggatattagccctttgtcagatgagtaggttgcgaaaattttctcccattttgtaggttgcctgttcactctaatggtagtttcttttgctgtgcagaggctctttagtttaattagatcccatttgtcaattttggcttttgttgccattgcttttggtgttttagacatgaagtccttgcccatgcctatgtcctgaatggtaatgcctaggttttcttctagggtttttatggttttaggtctaacgtttaagtctttaatccatcttgaattaatttttgtataaggtgtaaggaagggatccagtttcagctttctacatatggctagccagttttcccagcaccatttattaaatagggaatcctttccccattgcttgtttttctcaggtttgtcaaagatcagatagttgtagatatgcggcattatttctgagggctctgttctgttccattgatctaaatctctgttttggtaccagtaccatgctgttttggttactgtagccttgtagtatagtttgaagtcaggtagcatgatgcctccagctttgttcttttggcttaggattgaacaacctgctgctgaatgactactgggtacataatgaaatgaaggcagaaataaagatgttctttgaaaccaacgagaacaaagacacaacataccagaatctctgggacacattcaaagcagtgtgtagagggaaatttatagcactaaatgtccacaagagaagcaggaaagatccaaaattgacaccctaacatcacaattaaaagaactagaaaagcaagagcaaacacattcaaaagctagcagaaggcaagaaataactaaaatcagagcagaactgaaggaaatagagaccaaaaaaaacccttcaaaaaattaatgaatccaggagttggttttttgaaaggatcaacaaaactgatagaccactagcaagactaataaagaaaaaaagagagaagaatcaaatagatacaataaaaaatgataaaggggatatcaccaccgatcccacagaaatacaaactaccatcagagaatactacaaacacctctacacaaataaactagaaaatctagaagaaattgataaattcctcgacgcatacactctcccaagactaaaccaggaagaagttgaatctctgaatagaccagcaacaggatctgaaattgtggcaataatcaatagcttaccaaccaaaaggagtccaggaccagatggattcacagccgaattctaccagaggtacaaggaggaactggtaccattccttctgaaactattccagtcaatagaaaaagagggaatccttcctaactcattttatgaggccagcatcatcctaataccgaagccgggtggagacacaaccaaaaaagagaattttagaccaatatccttgatgaacattgatgcaaaaatcctcaataaaatactggcaaaacgaatccagcagcacatcaaaaagcttatccaccatgatcaagtgggcttcatctctgggatgcaaggctggttcaatatacgcaaatcaataaatgtaatccagcatataaacagaaccaaacacaaaaacaacatgattatctcaacagatgcagaaaaggcctttgacaaaattcaacaacccttcatgctaaaaactctcaataaattaggtattgatgggacatatctcaaaataataagagctatctatgacaaacccacagctaatagcatactgaatgggcaaaaactggaagcattccctttgaaaacgggcacaggacagggatgccctctctcaccactcctattcaacatagtgttggaagttctggtcagggcaattaggcaggagaaggaaataaagggtattcaattaggaaaagaggaagtcaaattgtccctgtttgcagacgacatgactgtatatctagaaaaccccattgtctcagcccaaaatctccttaagctgataagcaacttcagcaaagtctcaggatacaaaatcaatgtacaaaaatcacaagcattcttatacaccaataacagacaaacagagagccaaatcatgagtgaactcccattcacaattgcttcaaagagaataaaatacctaggaatccaacttacaagggacgtgaaggacctcttcaaggagaactacaaaccactgctcaatgaaataaaagaggatacaaagaaatggaagaacattccatgctcatgggtaggaagaatcaatatcgtgaaaatggccatactgcccaaggtaatttatagattcaatgccatccccattaagctaccaatgactttcttcacagaattggaaaaaactactttaaagttcatatggaaccaaaaaagagcccgcatcgctaagtcaatcctaagcctaaagtatggttttaaaacactggaagaaccaaatcagccagaaaggaatgtcttactaaaattaaacagaaatatttatctaagaacttacagatgcatgatcctaagaggagaaaatgaaatgtttagataatagtatatcatcatcctatattcaactgatttcctttacagtccacatgaaccaacaaaaataaaatctgcaacatgcaacttatccctgaaaacacatctcagggaataagattgagtatcctttacctgaaatgcttgggagccagaagcgaattttgaatttcttcagattttgaaatatttgcatatacataaaaagatatcttgagaatgagacccaaatctaaacacgaaattcatttatgtttcatatatatgttatacacatagcagaaagataattttatatatttcttataattttgtacatgaaacaaagttttgtaaatgttttggttgtggcctgtcacatgaggtcaagtgttggaattttctacttgtagcatcatgttcgtgctcaaaaagttttggattttggagtattttggcttttgaatttttcagattaggaatgctcaacctgtataacaatattgtgatagtaacgttaaattaaattcttacattaaaaatttttaaatttacaacttaaaaattattttaaatgtaagcattaaaaattaaaatttcatcacccaggtattaagcccagtacccattaatgataacaaacccccataatacaaggttacctacataacaaacctgcacacgtacccctgaactcaaaataaaagattaagaaataaattaaaattatttctctctgttttagattactctagtaataaaacaatataatcaaaacctaatcagcagagaataagtctttaatagttactaaaattggagagacatactggaactattccaaaaaattaaaaaggaggcactcctccctaactcattctatgaggtctgcatcatcctgataccaaaacctggcagagatacaacaaaaaaagaaaacttcaggccaatatctttgatgaccatcaatgcaataatcctcaacaaaatactggcaaagtgaatccagtagcacatcaaaaagcttatccaccatgatcaagtaggcttcattcccagatacaaggctgattcaacatacatgaatcaataaatgtgattcattacataaacagaaataaagacaaaaaccacacgattatctcaatagatgcagaaaaggcttccgataaaattcaacatcccttcatgttaaaaactctcaataaactaggtattgaaagaatacctcaaaataagagccatatatgacaaacttacagccagtatcacactgaaagggcaaaagctggaagcattcaccttgaaaacaggcacaggacaaggatgccctctctcaccactcctattcaatacagtattggaagttctggccagagcaatcaggcaaggaaaaaaaaataagggtactcagataggaagacaggaagtcacactatccctgtttgcagatgacatgatcccattatacatctagaaaaccctatcatctcagcccaaaagcttcttaagctgataatcaacttcagcaaagtctcaggatacaaaatcaatgtgcaaaaatcactagcattcctatacaccaacaacagacaagcagagagccaaatcatgaatgaactcccattcacaactgtcacaaaaagaataaaatacctaggaatacagctaacaagggaagtgaagaacctctacaaggagaactacaaaccactgctcaaagaaatcatagatgacacaaacaaatggaaaaacattccatgctcatggataggaagaatcaatatcgtgaaaatgaccatactacccaaagcaatgtatacattaaatgctattcccattaaactaccattgatattcttcacagaaatagaaaaaaactattttaaaattcatatggagccaaaaaagagcctgaacagccaagacaatcctaagcaaaaagaacaaagctggaggcattatactacctgacttcaaactgtactaacagggccacaataaccaaaacagcaaggtactggtacaagaacagacacaaagaccaatggaacagaatagagaacctagaaataagactgcacacctacaactatctgatcttcaacaaacctgacaaaacaagcaatgaggaaaggagtccctatttaataaacaaatttaataaatggtgttgggagaactggctagccatatgcaggaaagtgaaactggaccccttccttaaaccatatacaaaaattaactcaagatggattaaagacaaatgtaaaacacaaaactataaataccctagaagaaaacctaggcaataccactcaggacatacgcataggtacagatttcaggatgaaggtgccaaaagcaattgcaacaaaaacaaaaattgataaatgggatctaattaaactaaagaacttctgcatagcaaaagaaaccatcaacagggtaaagagacaacctacagaatgggagaaaatttttgcaaactatgcatctgacaaaggtctaatatacagcatctattaggaacttaaacaaatttacaagaaaacaaacaaccgcattaaaaagtgggcaaaggacatgaaaagatgtcttctcaaaagaagacatatatggccaacagtcatatgaaagcaagctcaacatcactaatcattggagaaatgcaaatcaaaaccacagtgagataccatatctcacaccagtcagaatggctattactaaaaagtctggccgagtgcagtagctcacacctgtaatcccagcacttcgggagcctgaggcgggtggatcacttgaggtcaggagttcaagaccagcctggcaaacatagtgaaaccctgtccctaatgaaaatacaaaaattagccaggcatggtggcaagcacctataatcccagctacttgggaggctgaggcaggagaatcacttgaacccacaaggcggaggttgcagtgagcagagatcgtgccagtgcactccagcctgggtgacagagggagactccatctcaaaaaaaaaaaaaaaaaaaaaaggtcaaaaaataacggatgctggcgaggttgtacagaaaaaggaatggttttacactgtcggtgggagtgtaaattagttcattgtggaagacagtatggcaattcctcaaagagctaaaagcagaactatcattcggcccagtgataccattactgggtatatacccaaaggaatataaattgttctattataaagacacatgcagctatatgttcattacagtacaataacaaagacatggaatcaacctaaattcctgtcgattacaggctggagaacgaaaatgtggtacatatatgccatgaaatactatgtagccataaaaaggaatgagatcatgtccttctcagggacatggatggagttggtgggacattatccttagcaaacaaacacaggagcagaaaaagcagaaaaccaaataccacatgctctcattcataagagggagataaatgatgagaatacatggacacatggggggacaatgcacactgggtcctactggagggtggagggtgggagggaggagaggatcaagaaaaataactaatggatactaggcttaatacctgggtgatgaaataatctgtacaacaaactcctatgacacacatgttatctatgtaacaaacctgcacatcctgcatgtgtacccctgaacttaaaataaaactggggagacagggttgtatttttccaatcagtaaactgaataatttttattggtaaataaaaaagatctatttatcatgtgtgcttttaaagagatttttttaacactctaattctcttctcttccccaaatatgccatgagatacttggttcacatttgtattactaccctctaaaagggaatgagacagctgccctgggtgtaatttagtggtactggcagtgagaaccctggtagatgaattttaaatatccctcttgatggggctcagaacacactgcctccaaaatatggcacatcgacacagagaacacagtagaagcaggaatgtcattctctaaccttctttcaccactctccagaggcaagtcagttcatcaagggagaggtaccttccctgtactgggaggaaaggaacatccttatctctaaagacacagggatgcagagaagaagaatctgaacagaaaggctttgctaaatttcccctagtttattagcattagatcgtaacctctttgtccaatcatacttttgcatgactgttcatttgtaataaaacctaagcataaaaatacacaggtttccctgtttcttgggggggtcttcatttctgaaggcttccatgttatgtaaagtttgtattaaataaaattgtatgctttttttttcttgttaatctgtctttcgttatagggtcctcatccatgaacctaagatgggaagaagagacatactttttctcccctacactgttacttatcttacttatctctttctttgaccagactctcactttaagatgttactcaaagtgtgcaagccagcagcatcaacatcatgtgtgagcttattagaaatgtaaattcatggaccctaccccaagctattgaatctgaatctctggagaggagagacaggaagcttttaacaagctcttgagataattcttatgcacataaagttaggatacttgttatcaatgctagctgcacattattattatcttagaaactttaaaacaaaagaacaaccaaaaccctggctctgatccaaccaattaaatccagaatctcctgggggtaggtctggatgtgtgtttaaaagttctctaggtgattttaataaagagccattgtttcaagagaagagcaaaatttgtaatttggtttatcattagcagctggctctctgacagtaccttaccaactcgtctgctaactattaacacaattatacaaccttttcttagcctctaaaccagcttctcctaggtatgtgaatatctggcttcttatattcataacctaattttcttcttttgcactttttatttctttgaatttcaaacataaacttaagtaggaataataatacaaagcagtggttttcaaacttcagtgtgcatcagagttacctaggattgttaaaatggattcctgggcccgaccccagagtgtctgatttagtagatgtgggctggggtcaaaaaatttgcatttctaacaagctccaagagggtcctgaagctactgggccaatgaccacactctgagaatgactggcataatagacccccatttacctgttacccagtttccaacaattatcaactaatggctaattctcatctcctctgtaccaccatccacttctccatggcccagattatttgaagcaaatccctaacatatcatttcatcaataaatatttcagtatacagtagtcccttcttgtccacagggataggttccaagaccctcagtggaggcctgaagccacagatagtactgtactatctatataacactatgaacagatttatttttcctccttcacaatttcatagatagaagattcatttttaccatagatgttagcaacctcagcctaccatctttttctaattgagaactttcaccttttcacttaaaggaagcactttatggcttctctttggcacactgaattgctagcatccctacttttgtgctttggggccattattaagaaaaagggttacttgaacgaacacaagccctgaaatactgtgacagttgatctgataactaagccagctactaagtaacttacgggtgggtagtgtacagagtggatatgctggacaaagggatgattcatgtcctgggaaaacaaagtaggatggcttgagatttcatcatgctgctcagaacagtgtgcaatataaaacttatgcattcttttctctagaatttccctttaatattttcagatcatggttgaccataggtaactgaaaaatcatgaaagcaaaaccacagacaaggaggaactactatatatcactaaaaagacaaagacttttaaaacccaacttcaatatgtcattaagtcactgttcaaaatttcccaattgtcattttttttccagtttgtttcaatcaagatgcaaataaggtataaccactatgtttgatgggtaagatctttatgttctctttccacatctttttacccttgtaattttttttttaagacaatgtcttggtctgtcatccatgctggagtacagtgatgcaataatagcttactctagcctcaatctctcagctcaagtgatcctcccacctcagcatcctgagtagctggaaccacaggtgcatgccaagacattgggatttttatttttatttttagtagagataaggtctatgttgcccaggctgctcttgaactcttgagctcaagtgatcctcccgctttggcctcccaaagtgctgggattacaggcataagccaccacgcctggcctctccttgtaattttgtggttgttgaagaaactgggtcatatgtcctataaaatttcccagtctggattttggcttctgcattctcatggtgttatttaacatttcctctgtcccctttatttcctgtaaattagtagttagatttagagtcttgatcagattcaggttccatatttttggaaagaaaacttcataggtgatgttgtatactgttgtaatttgttaagtgaggtatttaagttaggttttgtgtggcacagtgaggaacattcagactggaatggtggaaagattaggtttattactcatagatctaagtgagaaggcagagacaatgggaaggtgtggggtgtcatcaagaacatgaatgctcaaccagcaggtggggagcaaaagagagagggtgaaacctttgggtggaggcttttattggtgtgcagggtgttacctaggtgggtttcccctggcaacccctagtggggttgtttgaagggagcacaaggataagcacgggaacttggggattacattattaggttcctaacacttaaaagtaggtgatcaaacagtttgggatatggggccttatctatctagaagatgaaatgctaactagatggagactatctcaaaataggtgggtcaaaagtcaggggcaagacaacaaaatggatgctgggacagcattacataaataagagttatgacatgtacttccagtaggaagcaattaatgtctgttgcctctcttcttatgcttttaataaacgacgatcattgcctacatctactaattcagtagggttgcaaaatgggtaatcttctaatgttttcttcacttactaactgcaatagttttagaaaaagaagtatcttctcattacctatttggttaccctggggtatatatatcaaaggcaggataaattcttgattatttccagttagttgccatcatgtgttgcttaatgaaggggatgcattctgagaaatgggctattaggtgatttcatcatgtgaacatcatagagcgtacttatacaaatatagataatatagcatctagactatatggtatagcctattgctcctaggctacaaacctatcaagcaccttactgaatactataggaaactgtcacacaacgatagtagtgtacctaaacatacctaaacacaaaaaaggtataataaaatacatcattaaaacataaaaaatggtataactgtacgtgacacttacatgaatggagcttgcaggcttggaagttgttctgggtgagtcaggaagtgaatggtgagttaatgtgaaggcctgaaacactactgcatactactatcaattttataaacactgtatacttaggctactaaagttattaaaaaaatttttctttcttcaataacaaattaacttcagctgactataacttttttcctttataaacctcttaattttttaaactttttgactcttgtagtaacactaaacttaaaataaaacacgttgtgacagctgtacaaatatattttctttatatccttattctttatgtttttttctatctttaaaattttttgttttgttttttactttttaaactttcttgttaaaaactaagatgtaaacacacacacagcctaggcctatgcagggtcagaatcatcaatatcactgtcttccacctctacatcttgtcccactggaaggtcttcaggggcaacagcatgcatgaagctgtcatctcttatgataacaatgtcttcttctgcaatacttcctgaaggacctatgtgaggctgtattacagttaacttctttttaaaattgaagtacacactaaaataacaataaaaagaatagtataagaaatatataaaccagtaacacagtcatctattatcactatcaagaattatgtactgtacataattgtatgtactgtacttttatatggctgacagcgcagtggtatgtttacaccagcatcaacacaaacacataagtaatgtgttgtactatgatactaggatggctatgacatcactaggcaataggaatttttcaactccattataatcttatgggaccactatcatatatgcagtctgtcactgaccaaaatgttattatgtggtacatgatcgtatcacttttcaaaaatatagatttgaatagtgactagatacttgatgatacttaaaaattactgttaattgttttcagatttaataatggtactaaggttaggttaacaacagactgtgctttcagtgatatatactaaaatatttagtgacagaatgataggatgctagggatttgcttaagtgggtggtggtacagatgagatatgttattagttgataattgttggaagttgagtaatgggtaaataggggtttgttataccagttggtatatacacatttgatgtgtttcactaaatatgatgctcaaattggctcgcttttttttttttttgagacacagccttgctcaggctggagtgcagtggcacgatctcagctcactgcaacctccgcctcccaggttcaagcaattctgctgcctcagcctccagagtagctgggactacaggcacctgccagcatgcccagctaatttttgtatttttagtagagacggggtttcaccatattagccaggctggtcttgaactcctgaccttgtgatccgccctcctcagcatcccaaagtgctgggattacaggcgtgggccactgtgcccagctcaaattggctcacttttagcctgtgagatctctttcaagttgggttttttgttttgtttattttttagtcttcttgacagactctcatagcttttttttttttttaaagacagtttccttgttttctagaatgataaaatgtccacattcatattttagatttcctgacttacacagggaattctcagtgagctctggttcattttataaaaatgtggaaaatattatttaaagaatgcccacaagtgcttggatactattattgagttgatcattgcttttctaggtctttttagtggaaagaaataggtaattttttcaagataaaaaacaaactcaaatactttccattcaaatccaggaactatcggatttctacttaccctcaccagtcttaccccaggatctcctttaattagccaaaaaaatcctcttttttttttttgagataagagtttcactatgttttccaggctgatgtcaaactcggttcggcagaaaaatcccaattctttttttcttttttttttttttgagacggagtcttgctctgtcacccaggtttgagtgcggtggcacaatcttggctcactgcaacctttgcctcccaggttctcctgcctcagcctcccgagtagctgggactacaggcacccgtcagcacacctggctaatttttgtatttttagtagagacggggttttgccatgttggccaggctggtctcaaactcctgacctgaggtgatccactcgcctcggcctcccaaagtgctgggattacaggcatgggctgccatgcctggccctaaaaatcccaattcttaagacaccaatatagatactcagaataacactattaataccacaaacaaatgattataaaagagtttaaaacttctttttgcattctatttttcccttaggcaaattttcttttaagcaacaactttattcagatgtcacatattatataattcatccttttaaaatatagaattcagtagtttttagtatattcaaagttgtgcaacaatcaccactatctaatttcagaacattttcatcaccataaaaggaaaccccatatccatcagaagtcattcccattccctgcatccctcagctcctagcagccattaatctacctttattttctattttgattatttcatatacataaaacactacattatgtggccttttgtgtctgccttctttcacttagcatgtttgttttcagggttcatccatgttgtagcatgtatcagtactttattcttttttactgccaaataatattctattgtatggatagaacatagtttgtttatacactaggcagtggatggacacttcaattttttcagctttttggcttttatgaataatgttgctatgagcatttatgtgaacatacgttttcatttctcttgggtatatacccaggtatggaattgctggatctatggtaactccatctttaatgttttgagtagctgccaaacattttccaaagtggaggggttactttctactgggtctcctgtgagcaccaggagcagacaatcaaataatttaaatcactgaaaatagttatcctatgagaagttatgcaaataagtgaatccacaattagatccatttgtttcatttacttttgaggtttaggaattgctttctaaaaagttaatttttatataattatgtaaaatatttaaatgattccaaagctgaatttacaagaaaaaatatacaaaatatagtcaaataagtctaacttctattccttttctctcccccatttcctccctctctctatagataacaattttttatttttgttttatcctcacatctttcttcaacatgtgtgtatgtgtgtgtgtgtgtgtatccatagcaatatgtcccagggatcatctattgtaatatatgaagatacactttcctatatagctattgacagtatgatcaatatgtttcacctcagctctatcattttatgtaatatatatgtccatatatctgtgcctttcaaacagtcttattgtagatggtctgttctatttgctctctctctttttctgggatatattttagtattcaggaaagtttccatttttaacctaatgattacatttatgctaattacttttataaaaatactttatccccatgccacacattttttagggcaattttctatttgttctccactataagcaatatgaaaattaaaagacagcctttttcccctcctctccttttctccatatctgattttaagtaataacccttttattaccaattaatatctataagtcagtcagcaaatttattctacttttcatatactctttttcatcctcttcctatttttgcaatgttggtgtctacagccaatatacatactatgctgtatctttcacatccaccattttatcttagttctacagatgaatataaaatgctcacaatcagtcctgattttactatgtccctagtcatattgtttatctgaagctaattctctagtcgattcctcaaaatatttatgaaaacattccgtgagttcttacatgtttataatagtttgattatgacctttatatttaaaggtaagaatgagccaggcgtggtggttcacgcctctaatcccagcactgtgggaggctgaggcaggtggatcatgaggtcaggagttcaagaccagcctggccaacatggtgaaaccccatctactaaaaatacgaaaaaaaatagctgggtgtggtggcaggtgcctgtaatcccagctactggggaggctgaggcagataattgcttgaacttgggaggctgaggttgcagcgagctgagatcgtgccactgtactccagcctaggtgacagggtgagactctgtctccaaaaaaaaaaggtaagaatagttctatgtaaaatcttcggcttgcctattttttctttgagtatcctatattaacctattgtcttctgacataaaatgttgctatcaaagtctgatgatgttctgattttcttctttataagtgacttggtcttttctttagatggccaaagtgtttttttcccttttctctaaattcttatagttttcttagcatatatcaagtgttagccatctgggtcaattttcctaattatctgcatgccttttcaatatcaatgtcaaattccttattttgaggaaatatttattgaatggtagcttttagtatttcttctattcgttgctttgggcgtcatctttgcagactcctattatatgtactttggatcttctctgcctaaattctctatcactttctatcaaaactttttatctcttgagacttcaggttctaaaatggcagcatagaaataaggtggcttcaaccacacccctcaccccagaaaaccaaaaacaattatacagcaccaagattaccaccagcaatatcctagaactcaaatatgaagataagatagttcctagggcatggataaatgaaaaaactctgagcagacagagaactggacttccatatcagtgacaccctttcccccattggcctggcaccaactgcacagaaaaatttgcccccaggctgggtgcagtggctcacgcctgtaatcctagcacaggcatccacaagggaggaggatcctaggctgtaatccacaagggagaaggatcacttgcatctaggagttcaagaccagcctgggcaacatagtgataccctgtcactataaaaaattaaaaattagctgggcttggtggtatgtgcctgtattcccagctactcaggaggctgaggtgggaggattgcttgagcctgagaggctgaggctacagtgagccatcactgcaccactgcactccagcctgggcaacaaagtgagaccctgtctcaaaaaaaaaaaaaagggacctgaaggagatgagtgagaacccatgtgtgtatctggagaagggcatggtgacatggagaagaacatggccctgggatctggaccttactgaccactgatctttgaaaaatctctcagactgtataataccaatctcttctggctcttgctctcctttctaaatgctgcttctttctttctttctcttttttcccctacattctgctccctagaacaatattggagaagaaatataatttctcctcaacccttgttaagtttattgctgggataaaccactgtaacaaaagatagattaaaaagagaaaaacaagcaagtttactattatgtgcagtgtacatcacgcagaagaaatctcaatgaaaggtaactcaaaacagtgtcttggaactccagcttacctagcatcttcaggatgctatgtttctggaatattgataatgttctttattaatatgggtggtggtttcttggatatttacatatgtaaaaaattgagctgtacacataagatactgtatgtaagtaatatctctattaaaaacaacaacatgctgcctctgccattatctttccccctcaagctatttttatagaaattatagtcagcccttgctttcattgtttaagagtattttgagactacaacataatattgagctaaaataagtatatcaataccaaaatgtaaaaaatgtccaaagacaaaaacttggaaggtagacagaaaaattaaaatattttgttatgattatgggtattattttttctagctttctgttttcattatttttgttatactaattttttgccacaaatttctccaaaatataagtttatcctgtatatctaattaaaccacttaccacaatttttgtctccaaaatgtggtaaggttttctatttttctctaattctatacagcaaattgcagctaacacagttttcttaggctacagaatatgaaaaagtaaacaaagattatttttggcttcgtttgatacaaataatttctaaaaacaaaaagtgggtaagcaaaacatagaagaaaatggaaaaagtaattataaaagaagtttacaggacacaaaagtgttctgtattaacaatatgatagccaactaaaacactaatgttattttgaggtgcttgttaagtagcactatatcactgaacatgaacataacaatcaattgctgttagcttttgaaagatttagcaacgtatttttgtctgaagggagggcagtcttgaaaaagtgtgagactgaccaatttggtttttagctgtgggcaaatatcactggcatatccccaaatatcgagtaccttgagggtgttctacaactagccaaaatctctccataaagggccatctcctgggcaaaaatattctatgcctcttttcacatgctctaaagtctgctctcagctagccaagttacttagaaaaggacctgataaaaacaagtttaatgtgttactcccatgatactattatattttaagaaataatttcttaaatcaaaggaataaagctagtgagataattttttttatcagtaagaagaaggtgaaatcctccccaagttatctacctacatgactcattgctaacactggccctaaaaggcagttacaaagatatagtttgtatctttgcaggtatatctgcagtgttctattagtgctgtaacaaattaccacaaatttagagccttagaaaaacataatttgattatcttgcagttctctaagtcataaacacaatatgagtttcactgagctaaaatcaaggtgctaacaaggctgcattcctttctggaagctccgggagaaggaccatttccttgatcattcagattgtaggcagaattgtttcttgcagctgtatgactgaggtccccatttccttgctggccattcatagtttctagaggccacctgcattcctcggcttgtggtccacttccttcacctttaaagccagcaacagcaggtgcagctgctcttactttgaatctgtccttcttcatccactaacccccagctaggaaaagttctctgcttttaagaactcatgtgattatattggatgactggataatccaggatagttttagcatctgaaggtccctacccttaatcgcatctgcaaagttccttttgccatattaggtaacacattcacaggttctggggattagcatatgggtatctttggaggcccattattcagccagtcatgaaattgcattaggaagaatatagcagttaatttggggattataaaagcatattccttttttctaaagattcatatttagatatgagcataaacacataaaatgatatttttactaccttttttttttgtttttgagacaagttttcactctgtcacccatgctggagtgcagtggcacaatcatggcttactgcagcctgagcccaggcaatcctgccacttcagcctcttgagtagctacaactacaggtgcttgccaccacacttggctgattcttttctggtactttttgtagagatgggggtctcaccatgttgcccaggctggtcttgaactcttggactcaagaaatctgcctgccttggcctcccaaagtcttaccactttttaaacgtagtttgcgatttgtggttttggctttcaaggacttattaacaatgattaaaaaaaaaaaaaacctaaataataatttgaccatgtgaccatgttgtcaccaagtggtggtaggaacttggcatgtggtactggattattaaagatatccaaaagaaaacattttaagttattgaagaagttgcttttaaaaagaaaaaaattaccaaaataggtgcacctaccccaacctgcctagacacaactcattagaccaggcatgtgtaccaaacctaagctgagccagtgatcccttccctgagggagcgtttaaaattgggactaagattcttgtctcagccttactgctctctcaaataaaaaaaaatgtacactttagagttgttaacactggtcactttccagcacataaactgaggtgggtaaaaaaggtcaatccactggaaaagaaaaaaaggacctggatatacagacagaagcagagacaaaagagacaaagagaacaggtactttctgtgttctcctagcactccagttcctgtttcctgagatctggctatatcctttccctggcttctggaaggtatccctgtatccttataaccaattctcctttttacttaatggtttcttctacttgcatcaactaaaagaaaacatagagtaagtttgaagtcataagatcagccacacttctccagcactgcttgtgtttttctcacttctggcataccactgcagtgttgcctcttcctatgtaataactttatatttaaaaacaaagaaacaatcaacacactaatacttataagaggaagcaagcaggatgtccgatgcccatggaaaaggtatcatagaatcgtggagttgaaaagagagagttaatcatttagcttagacaatttattttgtagatgagaaatgtaaagacccagaagaggcctttgactttgtaaactcaccgctggagtcttgactccaggctttacaaacatgctaatgctactcttacattaaaacgaaataagcaatcatactaaacagcacaatatagagaataacaattcagaatgttttataaagtgttgatatatcaaaaagtgatacattcctttgagggaagagactatttttttccttctgtattctgtcaaattgcttaggcatgcaggttatttcccaacagggaaataaatatttaaactaaaaaacatgacttgactataaggacttttaaaagtatctcttcaatgccaacctcacccttctctttactattcctgtataaatatattacattgaaaggatcctcaaaaggataatctttggctctttctgccatcttggagcctgtggaggcctgctgggaacaggatgtctaaaagggaaatatgctggaaggctgtggtacaagaccatgtttgcttgctctaagtggggtctccagaaccaaagggagtatgcagctcttcttaaagttgaaggcgtttatgcttgagatgaaactgacttctatttgggcaagagatatgcttatgtatataaaacaaagaacaacatagtgactcctggtggcaaaccaaataaactagagtaatccatggaaagataatttgggcccatggaaacagtatcgtggtttgtgccaaaatccaaagcaatcttcctgctaaggccactggacacagaatctgtgtgatgctgtacccttcaaggatttaagctaatgaaaagtaaataaaagtggatttgtgttcttggggggaaaaaaagcataaactttggccaatttcaataaattcaattcataaaattgtacattcacaaagtaagtttaagtggaaaaaaaatagatgcaaagtttcttacattcatttagggcacattaactgatgtttaggaccatttactgcagatggtaagtcactgcaattattttaattgaaaagatgaacagggagatgcctttttattataatgcttaaacgaatattcaaagacagagaaaatgagaatcacaaaaaagttatctcttacacaagcaatagcaccacctgctgatagataaaagcaacaatgtcagttaattaaaaataaggccaagtactttgtatatttagatctttccccttggatgctattgtttaatatagtataattcattaatatattgtacaatttatttataataactatgttaatttgaacattggtgcccttacaattggaatcaagcatttcttaaaaatcaaaggtaaaaataaaatttattatgtaatatagaaaacattatagtactatgacttttaatttttatcccaaaggtaattcatttgtaccttatttattttacttaccatccagtaatgtacaattagtttctatatttgtttttatatttcctgatcatctcatttaaaaaatgccatctccttcgcccagcttaatttttatagcactcattaccatttaaaatatgttacttttgcttgtttatagtctttcatctgatggaataaaaactgtcaacaaaacagaatttattttatttattgattttctttaacaactagggcaagtacctggcatctaacagactctcaataaatatttgtaaaagaattgataaatatgaaaataaatgaacaaattaatatgcaatgcatttttatacttccttgaagtaatagctatgtcaaaagtttcaaagctcttgacagattttaccaaactatccttgagaaaggctgtaccagttaatgttcccatcaatgttctacaaggagccccattttcccatttctgatgaatgggaatggcataacattgtaatttttatgtgcataaaactcattgctaaagagacaacatattttgcatttctgggggtatgtacccttcttttatcctttgcttttttccaattccagaatttctattacattccttttgtataatttctatccttttactggtattttctatttgttcagactgtgatctgttttcctttggctctttgagcatatttaagatcactgatttagtctttgtccagtctcttcaacaaatggtgctgggaagacaggatatctatatacagaagaatgaaactagacccctatctctcaccatatacaaaaatcaagtcaaaatggattaaagtcttaaatcgaagacccaaactatgaaactactaaaagaaagcattgggaaaaatctccagcgctggtctgggcaaaaatttcttgagtaatactccacaagtacaggcaaccaaagcaaaaacggacaaatgggatcacatcaagttaaaaagcttctgtacagcagaggagacaatcaacaaagtgaacagacaactcacagaattggaaaagatatctgcaaactacccatctgacaaaggattagtaaccagaatatataaggagacccaacaaccccatgggaaaaaaatctgataatatgatcaaaaattgggcaaaagatctgaatagacatttcttaaaagaagtcatacaaatgggaaacaggtatatgaaaaggtgctcaatatcattgagcatcagagaaatgcaaatcaacactacaatgacatatctcactacagttaaaatggcttgtatctaaaagacaggcaataacaaatgctggtgaggatgtggagggaagggaacactcatataccgctggtgagaatgtaaatttgtacaaccactctggagaagagtttagaggttcctcaaaaaactaaaaataaagctaccatatgaccaagcaatcccactgctaggtatacacctaaaagaaaagaatcagtatatccaagagctatctccatgtttgttgcagctctgttcacaacgggcaagatgtggaagcaacctaagtgtccatcaacagacgaatagataaagaaaatgtggtacatatacacaatggagtactattcagccataaaaattaatgagatcctgttatttgcaataacatgtatggacatagagatcactatgttaagtgaaataagccaggtacagaaagacaaatattgcatgttctcacttatttgtgggatttaaaaatcaaaacaattgaactcatggagatagagagtagaaggatgatgcctgtaatcccagcactttgggaggccaaggtgggtggatcgcttaaggtcaagagttcgagaccagcctgaccaacatgggtgaaatccagtctctactaaaaaaaacacaaaacttagtagccaggtatggtggcaggcaactgtaatctcagctactcgggaggctgaggcagaagaattgcttgaacccaggaggcagaggttgcagtgggctgagattgctccattgcactccagccttggcgagagagcaagactctgtctcaaaaaaaaaaaaaaaaaaaaagagaaggatggttatcagaggctgggaagggtcatgggttgggggaggagaggaggtgggaatagttaataggtatttaaaaatcagaaagaatgactaagatctactattatttgatagtacaacagagtgactatagtcaataatttaattgcatattttaaaatcactaaaggagtataattggatggtttgtaacacaaaggataaatgcttgagggaatggataccccattttctgtgatatgattattatacattgcatgcctgcatcaaaacatctcatatacgccataaatatctgcacctactgtgtatctacaaaaattaaagttaaataaataaaaaaatcaaatctataaaagtagagagtagaacagtggttaccaggtggtgcgtagtggggaatggggaaatgctgatcaaagggtataaagtttcagttagacaggacagaaagttttcaaaatctattgcatagcatggttaataataataacaaagtattgtaaatttcaaaattgttaaaatagaagattttcaacgttatcactacaaaaaatgttatgtaaggtgatagatatgttagtttgatataatccttccacgatgtatacatatatcaaaacatcacattacctgtacctcataagtatatacaattattatttgtcaattaacaataaaactttgaaaaaaataaagtctttgtgtaataagtccaatgctgggcattctcagggatggtttctattaatttctttccctgtgaatgggccgtaatttcctgtttctcatatgccttgtaattttttgttgaaaattggatgtttttaatatcataatgtggtaactctggaaatcagaatctctctccaacaaggcttgcattgttgcttgttgagggctcagttaactgtctatttactgacttttccaaactatttttgcagactgctttttgtgtgtggtcactgaagtctccattccgttatctcagtggtcagccagacagagccaaaaagaaagaaaaaaaatactctcccactctttgccaattggctctgacctaggcactcctttaatacacggccagaccacctacaactctactttagctttcactccttgtttgttcataaatgaaagatattccagtgatacaagcctcacatcctctggtcttttctgagtgtgtctggccctgggcatgtatgttacattccagatccctcagtatatgtgaggaccctccaaagcccttattcgttgatgccactctgagagatttctaaggcgtcaaaacaaagacaaaactttatgccagtcattcagggaactatgagaggtcaaaaagtgcaatttgtgagaaccacaactttttgaggacactgtccatattgtgtaccctgccccacccccactgcaccacccaatacacacacaccagcaagccacaccagaacccaggttgccatcattttagctaccgccaggctgggagtgggggatagtaggcaggtaagcaaaaatgccacaatgctttcttaccaaaatttagcagtatttttttttaattaagcactcctctggttgctagtggtttttttcattagatctcaaagctcagaaaaaattgattctgacattttttgccagcttaacggctgcttcagtggaggaaccaatttctagggctgcctattccaccattttctgtgacaccatacctcttctgctcatttttactgaagaaagttttaaaagctttattgcatctgtataactgatacagagtcagagagaaaggctcacactacacaaaatcatctaaagaggaaggaaaagatgacccaaatatactatccaacaacaatgggtatacctttagccatacattcaaagacatgggtacacaattttacttacgtgagatcatagagtaacatgctgtcctataacccagtctttttactaaataacatcataagtatctttccaggtgattaaacatgatccttcttctccatttttaaagagttgagggtattgcactttaggtatacagaataataaccaatcagtctcctgctcatggacatttatttttacttttcactattaatactgtgatgaaaactgatatgcatatatctttgtgtacttacacaatgatctctttaaagaaaattcctagaagagagattcctgagtcaagggatatgtgcatctgacatttggatatgtattatcaaaatacccttcaaaaagtcaaatcactctatatttccactaataccatataaacaaagcagctcatttcctcctgctcaagtgaaactgagggttttaggtcattattaatcttttcaacttattgggtaaaatatatcattttatttatttacttctttattttatatttatttattagttaaattgaacatcctttcatgtttttattggccatttacatttgtctatgaactattcatgctttttggctatttttctagataatttcttgaacaatgaaattcaaacggtagctttcccactctactctgccttgagaaccactgcagtagtttagcatagctctgaaatgtgcaaagctgatttttacaaactcatgttcaattatttaaaataaacttttgatatgtaaggaataacaatagcagaacagctgctattagatctgccttctcacagataacacctatgtactccagacaaaatacaaaaacaagtatttgaacactggacagcaatcaaaagtaggcagacagccactttggaaaacaatttggcaggtcctcaaagagttaaacatagggttacacttgtcgtagcaattctacttctaagtatacactccagaaaaattaaaatatgtccacacaaaaataaaaacatgtgttcacacattcatagcagcatgatttctaataaccaaattttgataccactaagtgtccattaactgattaataaacaaaatgtgttataaacatgtgatgaaatattatttgtctataaaaaagaataaagtactggatacatggattaatcttgaaaacatgctaactgaaagaagtcagtcacaaaaggccacataatgtgttatttcatttatatgaaatgtccaaacttgacaaatctataggaaaaaaagtagattagtggttgccagggactaggaatagagtagggaaaaatagggattgacagttaatgggtacacaattccttttagaggagaggaaaatgttctaaaattagagttttgtaacggttgcacaaccctatgaatatagtaaaaaacactttttttaattgggtacattttaaatgggtaaaatgtgtcatatacaaattgtatcctgataaatttgtttctttaaaaaagcagccagaaacttgagtcaatggttgaaagaagagaacagggctgggcaccatggctcaccctataatcccagcactttgggaggccgaagcgagtggatcacctgaggtcaggagttcgagaccagtctggccaacatggaaaaaccccgtctctaataaaaaatgcaaaaattcgctgggtactgtggcaggtgcctgtaatcccagctactcgggaggctgaggcaggagaatctcttgaacccaggaggcagaggttgcagtgagccgagatcgctccactgcactccagcctgggtaacagagctagactccctctcaaaaagaaaaaaaaaaaggaacactgcacctcaactaaaaatttgtgaagagctctcaaacactaaatagaaattttataaatttgtggaaaatgctagggtatagatcattcctggagattagattcttatatatctgatattgaaattctttcacaaaatctggccctggataaataccactttaagttacagattatgagagaaacaaaaagaaacaaggggctacatttaagggtaacatttccagattcaagaaaacatgtactttttaaaagaagccttggcaagttttttttcgaaagagaaaacattgtgtgagaaaagcagctgacataagctgacttaaattttcaggtctaaattgacaccattaagagtaagttgggtcaacttactctaagctgacaccagcagttaccatatctacttacttggtaagaagaaaaggtgaagagtctcaataagcgatgcccttcttatctttcatcacactaacctgctttgaccctccagacattagttctcattactaacagcagcctgttcctgtttttaaaatttattacaactataattaaataactgagtgtataattaatgttttaatatatgtcttatcaacaagaaagtaaactctataaaggcaatttctgcttgggattcttaaaaaagatatgcagaggccgggcatggtggctcatgcctgtaatcctagcactttgggaggccaagacgaacagatcacttgagctcaggagttcaagaccagcctgggcaatatggtgaaaccccgtatctactaaaaatacaaaaaattagctgggagtggtggtggacgcctgtagtctcagctacttgggaggctgaggcacaagaatcacttgaacccgggaggcagagattgcagtgagctgagatattgccactgcactccagcctgggtgacagagcaagactctgtctcaaaaaaaaaaaaaaaaggatatgcagaaagtatttacatacttttttttaactcaaaatgctcatagcatttatatcttagtgagtagaattattccccaataaagatgtatgccaccaggcaggacacggtggctcatgcctgtaatctcagcacttcgggaggccgaggcaggtggatcacgaggtcaagagattgagaccatcctggccaacatggggaagccccacctctactaaaaatacaaaaattagctgggcgtggtgatgtgcgcgtgtagtcccagttacttgtgaggctggagcaggagaatcgcttgaatccaggaggtggaaattgcagtgagccgagattgtgccactgcactccagcctggcgacagagcgaggctccgtttcaaaaaaaaaaacgtatgttacctgaaaaatagtttcccatattttaactaatacatatttctaaaataacttgatagcttcaaaagacaacatttcttaaaaagagaaagaaggctgaattacatgattagagaatctagggaaagctaaataaaataaaggataaagctattttttcccttttcaaaacctgtacattttatttgaaaatgtacattttttaaatgtacattttgaaaatgtagatatgcaaaaaagaagaaaaatcacctatcaccacttatgactaaatcaccaaactccagacataaccattgttaaaatttgttatatcacgtcagactatttttctgttcatttatacagatatatactaataagatcaccctatgcataaagtttgtaactacttttttcttgtggtcatatattttaaaacattttcatggtattataaaagtaattatcatttttaataacaatataataattaattataagaattatattccataattaagttaaataatatcttactgttagagatttagattgcttttcatttgttaaattataaagaatgttccactaagccttctttatcttattattaccttaggataaatcctaaaactggaattgctgggttaaagtatatgtttatttcttgggcttttgatatatagtatcaaaatatcctccagaaagatttgaacaaatatatatatacacatatattatatgtatatatatatacacacatatattatatgtatatataatatatatatttgtatatattatatatatagtatatatagacatacatgaatacatacatatgcatacatacacacataaataacacattaagtaactcataaaaatctaaatattaagtaacataaaaatctaaatgataactgtataaaaggatatattacagggttaatacaaaccttgcaaaaagaaatgattgcataaatgaattccaaatccttttgtgaaaatacacaaggcagaaaatgagcaaaaaaactattgataattcaatgaatgaaagttaagtgtttgaatagtatttacaactagctattctgaaagaatcagtctagaacattaagagataataccatcacacatatgattcatatactatcaacatttttgctgcagcaaagtggcagacataacacaatagtaattttttttttttttttgagacagagtctctctctgtcacccaggctggagtgcagtggtgcgatcttggctcactgcaagctctgcctcccgggttcacgccattctcctgcctcagcacccgccaccacgcccggctaattttgtttttgtatttttagtagagacggggtttcaccatgttagccaggatggtatcgatctcctgacctcgtgatctgcctgcctcggcctcccaaagtgctgggattacaggcgtgagccaccacgcccggcccccaacagtaattttaaatgaagaagatgcttagaacaagtcagaagaataaattacctgagatttttaagaaatgtaattttttctattatactattcttttttggtatcacctgcgttatagtttgctatttcatctccaaattcaaggtattttttctacagtagactaagcattgcccatttcaggacttaaaaggaatatcaagcatctcactaagtcttccttcaagtgccctctgaggacagcctgcataaagacaactaggaaacttcctaaaaataccacttcacagagcctcattctctgagattttgattctccatattgcaaatagtgcccaagaatgtgtatttttgcaatacccaggtgatgcttatgaatgctgaaatttaggtaacttggtttactatcgtaatgattgaacagggcatcacatcatgaaagggcattatcctcaggcaaacacccagacaataaggaatggaaactcaggtaattattcttgtctctttctacttatacagcaaggatttatctcctgaacctgtctatttctttccatctccactgctacttccctattattcaggccaacgtcatcattttcttgtactacaacagctcctaattagccatcctgcctctagtgtacctctactctaatctgtcctctatgatgatcttagagtatgcttccccaaaaatgccaaatctaataaggtaactatctaaaattgatcagtgactcaccattgcccataagataaactccaaactattgtggccatactaaattcttaatttttctaataaactatgatacctcacctttgtttattctattccttctctcgaatcactgttcctttcacctcaaagcagtatttccaacatttgaatactaccatgttactacacaccatccatggctctctactgactaatatactcaattgccaacctcactgtttttcagctgttcaaagaaaatcttatattagacgctcaaacagtataaccggaactgctctggttgcaggtagtgagagagatcaggggctcaactccctcacctcttttctaccccacagcaaccccaaaggaggctccacagaacagaattagattttaaaagactgaaatctggattctgttgcatggcaaacactttagtccatctatcttttctgtattatctcctggtattatgccatgaaaattttacagacattgcacaaaaagcaccatactcttttgtactttgattcacaagaggtttcttttgcctgtaactctcttccccaactttgtctccttggagaactactaattcttcaaggctctgctctctagtcaatgtcccacaggctgagttaggctcttccacacccttgcagtgcttgtataaaaaacttcctgtatagcacttgtcataatgtactgtaagtcttatagtctaattctccactagactgtcaacaacttgagtaaaagtctttatatctttttcttatttatacccccagtttctagaacactgtctgatgagtagtatatatttaatgtctattaaataaaagatagaggttaacattctaaataaaacgactagatgcctaacgaggtaaacctttaatatgtttttaaaattttaaaatattttaatcaaaatgacaaaataaaattatgtttaaattggcttattaataaattgttgagtatctactgtgttgtacagataatacagaattattgaactattggattttataaactagggagtcaaaaataatatacatgaaactaaaattgacaatgtaagaatgtaatacattgtgaaaatgagactacacattctatagatttagaatcattgatagggaaaatcagaggtaaaagctccttaagtgattagatgggatgatctaacatcctgatgttgtaattgagaaaggagggacctagcagaaaagaaattagaaaaatatacaaacaaactttagagtcaatggaaggcatgatcaaaggaagtcaaacttgagacaggcctttaagaatgagtggaacttgggccgggctgggtggctcacagctgtaatcccagcactttgggaggctgaggtgggtggatcactaggtcaggagatcgagaccatcctggctaacacagtgaaaccccgtctccgctaaaaacacaccaaaaaaactagccgggcgtggtgacgagtgcctgtagtcccagctgctagggaggctaaggtaggagaatggcgtgaacctggtaggcggagcctgcagtgagctgagaccgcaccactgcactccagcctgggcgacagagcaaggctccgtctcaaaaataaataaataaataaaataaaataaaaagaatgaatgggactcactatggtctaagacagaaatcaaagtattccatgaaatgagaaaatgagtagggatgttagtaagaggtaggaaaggttcaaaagccagtgttcaatgtgagttgaacacacttagagagttgtgggggaaaagactcaatggattttatggcaccaggtttcaaacagcttttaaagctaggcagaggacttcatattttatgtgatagaaaacaagtaaccagaaatcttaatagattaaaagctctaaaaattctgtcttattctgcattagaggcaaataagccacagaacaattttatgatttccccagttaggaatagtataaaacagccacactcaaactctttttaccacataatgctgctgcttttggggtacttcaacgaacaattcattcaagtacaatgggtaaatgctgctgagcttggctatttccccaggttctaaacagaatttgtatgaaggagggcatattctcttgtgaggaaaaattcttgcatgtattcaaatatgaattcttgataaagaaaaatatgccctttggttatttatttatttatttagagacagggtctaattctcatccaggctggagtacagtggcatgattatagcttgctacagcctccacctcctgggctccagtgagcctcccacctcagtcttcccagtagctgggaccacaggtatgcaccatcatgcctggcaaatttttcaattttttttatacagacagagtttcactctgttacccgggctggtctcaaactcctgggctcaagcaatcctccctccttggactccggaagtgctgggattacaggcatgaaacaccacatccagccatgtcctctggtcttaaaatgactatttttccaatgcactattaatttcttacgcaaaatatgcaatcgagatttcgtatgaaacatattgacagcaaaaaaaaaataaaagtttataagcttcaagtcagtgaaaggttagaaaaaaaaagtttaaaactgaattttccatattgaatgggcataaattttaatactttaactacttcatccttcacaatcatgctcaaaataatatttccagaaagacaaatagtagagatcgtgcccatgcttcaaacttaaacagattttggtcccatatatctggaattgattgaaccagcatattaagaagacaaatcagaaagattcaaccagatgcatccattgaaaatgttttttaaagactgagaaccatgtgtgttgtgcattaccacatttatgacagcacatctgtgattgctcaccactataacttaccccagttttatcacacaagcgtaaagtatgaaacgatccaacagcaaataattctccatctggagcccaggcaactgaagtaatgggatgctcatgaggttgtgaattgtacagtgggcggccgtaactatcccatacctacaaaagcaatttttaaaaatcttttataatatcagggagaagtttgcaaaaactaaaagaaaaataaataaataaaataaaaatgttttataacagacaccacataaaaacaagtttgtcttccagtaaggtagtaaataaaaatttagaaatcagcaccttatatattagcaattaaacgtctttactatcacacaaggggaaaacaaagctgtattcctttaagcctaaatgtctcaaaaagaaactattttataacactgtcataattttcagattttactaaatctctgaacataaaatctacccattttaagtccttttaaatataatagtacattttgaaatgtttagttcttagctttgttttgttttttgaattttagagacagggtctcactctgtggcccaggctggagtacagtagcatgatcatagctcactgcagtcttgatctcctgggctcaagagatcttcctgctttagccttccaaataagcaaggactacaggtacatgctgccatacttggctaatttttaaatttttgtagagatggggtcttgttatattgcctaggctattctccaactcctggtctcaagtaaccctactgccttggcctctcaaagcactggggttataggtatgagctaccatacctagcttgcttaccattttgcttaaattttttctccctgtaagggctctacctactttctctaaaagtatttatttcaatttaattgcctctaactctagttattaatacattaaaccttattcctctctacaaattattttgacctgaaattgatcaatatttagtaaaccagcagggttaatttttaaaaacatactgaactgaactcaaattgagtcacggtaaaattaggggctatactgatattgttacttattaaatatcaaactctatagatcaatgagatagtctttctttttctgagagagggtctcactttgttgctcaggctggaatgcagtggcacaattatggctcactgcagcctcaaccacctgtgctcaagtgatccactcacctcagcctcccaagtagctgggaccacagatgtgctccatcacaactggctaatttttttttgtagaggtagggcctcactgtgttgtccaggctaatgagatagtttttatgaagtccatgctttaaaataccacttaacattataaaataatttgctaaattactggagtaaaaagacatggctaaagtaaaaaactaaaagaatattcttatatgctaagtacttataaatttgattatttcagccaagtgataaatctaaacattatataccttatatttacagtcttcaccagcagataaaataagatcattgaccgagttccaatctacttttaaaataatgccatcatgagctttccactgtgagaaaaaagaataagatattaattataagtttaaaagcacttaagtttttttctgtaagaaatatattttgcctctttctaatgactcctttgtcatcttctcagggattcctatcttccttttatagccaatgtacaatacctcatttgcttgtttcatttgtaatttatactaatgtaagcacctagcacctaagacatccactatatagcctcaaaccttatgaatttcctcagttgcctggactccagatggaaaatgacttgctgctgaactatttcaagccggacatttgtacaataacactgaatgaatatgttatgtattccaaaaatgtcaactgaatccaaatcttgctttctccttcatatagcagattccattactgatactgccttcatgcttgtttacttatttattttatttatttatttatttatttttgagacagggtctcactgtcacgcaggttggagttcaatgatgtgatcagggcaactgcagtctcgacctcccacattcaagcaatcctcctgcctcagcctcccaagtagctgggactacagggacatgccaccacacccagctacttttttttttttttcatttttggtagataactcttgctatattgcctaggctagtctcaagctcctgggctcaagtaatcctcctgccttggcctcccaatgtgcggggattacaggcgtgagccaccatgttcagcccccctcaaccattttttttttaaacttctgcacaaacatctttactaccctcttcatttcattctgttcgtcatattcttctaagtttcattcactttatcttcatgtgtctggtttacaactggactactctgagaaacttctgctgtatttaccatgtaacaaaaagatgttttccatagataagtatatattctatacattcattctttggtatacagtcattctttggtatctgtgggggattggttccagtacctcccattgatatgaaaatcgttaagttctgccttggcctcccaaagtgctgggattacaggcatgagccaccgtgcccagccatggattcttaagagtttcattttaaaggaacaaaataaatattgcgtattcaagatttatgaataaaatatgatttaaattttccttacactgtaatttagggtatcaacatatattacaaatatttgcatattgttaaacatataataatttttatttatttattaatgtattaggcattttgtaaaattcctttgaacaagaagctccttgaaggcagaaactatgttctgtttcattttgactatctcatacctaccacagtgcctggtatataacaggtatgcattacatttttattcaacgaataaataaaaatttcctcactataagaccaagttcgaagtgttgagaaggccttaaaagacatgaggtatatacttctgaactgcattccacaagcaagaattaattaagcacacttttttgtggacaatcctaatttgaatatgtttttatgctcaagaagaattgcagctgctttagtctcccaaaaggaatagataatttgcatgaagttactaattatactttaagtcctgtttctctctagctaattttggcaatggatactttgattcactctactacctcctggcccagaggttctactgaaccactaagccatatttaacttgaccaattgtgatataaccagcttcctgagtttcatttctataagcctaattacaggtatctaaacaaatttacagggacaccattccaagatggctgaataggaatagctctggtctgcagctcccagtgtgatcgacacagaagacgggtgatttctgcattttcaactgagctctgaagagagcagtggttctcccagcacggcgtttgagctctgagaatggacagactgcctcctcaagtgggtccttgacccccgtgtagcctaactgggagacagttaggggccgattgacacctcatacaggcagattgacacctctgggactaagcttccagaggaaggatcaggcagcaatatttgctgttctgcaatatttgctattctgcagcctctgctggtgatacccaggcaaacggcctgaagtggacctccagcaaactccaacagacctgcagttgagggtcctgactgttagaaggaaaactaacaaacagaaaggaatagcatcaacatcaacaaaaaggacatccacaccaaaacaccatctgtaggtcaccaacatcaaagaccaaaggtagataaaaccacaaagatggggagaaaccagagtagaaaagctgaaaattctaaaaaccagaacaccccttctcctccaaaggatcgcagctcctcgccagcaatggaacaaagctggacagagaatgactttgatgagttgacataactaggcttcagaaggtcagtaataacaaacttccccaagctaaaggagcatgtcctaagccatcacaaggaagctaaaaaccttgaaaaaagattagatgaatggctaactagaataaacagcgtagagaagaccttaaatgacctgatggaactgaaaaccatgggatgagaactacttgacacatgcacaagcttcagtagctgattcgatcaagtggaagaaagggtatcagtgattgaagatcaaattaatgaaataaagtgagaagagaagtttagacaaaaaagagtaaaaagagacgaacaaagcctccaagaaatatgggactatgtgaaaagaccaaatctacatttgattggtgtacctgaaagtgatagggagaatggaacgaagttggaaaacactcttcaggatattatccaagagaacttccccaacctagcaaggcaggccaacattaaaattcaggaaatacagagaacacaacaaagatactcctcaagaagagcaaccccaagacacataattgtcagattcaccaaggtagaaatgaaggaaaaaatgttaacggcagccagaaagaaagatcgggttacccacaaagggaatcccatcagactaacagcagatctctcagcagaaactctacaagccagaagggagattgggggccaatattcaacattcttaaaggaaagaattttcaaccctgaatttcatatctgaccaaactaagcttcataagtgaaggagaaataaaatcctttacagacaagcaaatgctgagagattttgtcaccaccaggcctgccttacaagagctcctgaaggaagcactaaacatggaaaggaacaaccagtaccagccactgcaaaaacatgccgaattgtaaagaccattgatgctaggaagcatctatgggcaactaatgggcaaaataacccaactaatgggcaaaataaccagctaacatcacgtcaggatcaaattcacacataacaatattaaccttaaatgtaaatgggctaaatgccccaattaaaagacacagactggcaaattggatgaagaatcaagatccatcagtgtgctgtattcaggagaaccatctcacatgcagagacacacataggctcaaaataaagggatggaggaagatctaccaggcaaatggaaagcaaaaaaagcaggggttgcaatcctagtctctgttaaacagactttaaaccaacaaagatcaaaagggacaaagaaggccattacctaatggtaaagggatcaattcaacaagaagagctaactatcctaaatacatatgcacccaatacaggagcacccagattcataaagcaagtccttagagacctaaaaagaaacttggactcccacacaataataatgggagactttaacaccctactgtcaatattagacagatcaacaagacagaaggttaacaaggatatccaggacttgaactcagctctgcaccaagcagacccaatagacatctacagaactctccaccccaaatcaacagaatacacattattctcagcaccacaccacacttattccaaaattgaccgcatagcaggaagtaaagcactcctcagcaaatgtaaaagaacagaaatcacaacaaactgtctctcagaccacagtgcaatcaaattagaactcaggattaagaaactcactcaaaaccactcaactacatggaaactgaacaacctgctcctgaatgactactgggtacataacgaaatgaaggcagaaataaagatgttctttgaaaccaatgagaacaaagacacaatgtaccagaatctttgggacacatttaaagcagtgtgtagagggaaatttatagcactaaatgcccacaagagaaagcaggaaagatctaaaattgacaccctaacatcacaattaaaagaactagagaaacaagagaaaacacattcaaaagctaacagaaggcaagaaataactaagatcagagcagaactgaaggagatagagacacaaaaaactcttcaaaaaaatcaatgaatccaggagctggttttttgaaaagatccacaaaattgatagaccactagcaagactaataaaaggagaagagagaagaatcaaatagatacaataaaaaatgataaaggggatatcgccactgatttcacagaaatacaaactaccatcagagaatacaatcaacacctctacgcaaataaaatagaaaatctagaagaaatcgattaactcctggacacatatgccctcccaagactaaaccaggaagaagttgaatagactgataacaggctctgaaattgaggcaataattaataacctaccaaccaaaaaaagtccaggaccagacagattcacagccgaattctaccagaggtacaaagaggagctggaaccattccttctgaaattattccaatcaatagaaaacgagggaatccttcctaactcattttatgaggccagcatcatgctgatacgaaagcctggcagagacacaaccaaagaagagaattttagaccaatatccctgatgaacaccgatgcaaaaatcctcaaaaaaagtactggcaaactgaatccagcagcacatcaaaaagcttatccaccatgatcaagttggcttcatccctgggatgcaagggattcaacatacgcaaataaagaaacgtaatccatcacataaacagaaccaacgacaaaaccacatgattatctcaatagatgcagaaaaggccttcgacaaaattcaacagcccttcatgctaaaaactctccataaactaggtattgatggaacatatctcaaaataataagagctacttatgacaaacccacagccaatatcatactgaatgggcaaaaactggaagcattccctttgaaaactggcacaagacagggatgccctctctcaccattcctattcaacatagtgttggaagttctggcccgggcaatcaggcaagagaaggaaataaagggtattcaattaggaaaagaggaagtcaaattgtccctgtttgcagatgacacaatcgtatatttagaaaaccccattatctcagcccaaaatctccttaagctgataaccaacttcagcaaagtctcaggatacaaaatcagtatgcaaaaatcacaaccatttctatacaccaatgacaaacagagagccaaataatgagtgaactcccattcacaattgctacacagatactaaaatacctaggaatccaacttacaacggatgtgagggacctcttaaaggagaactacaaaccactgctcgacaaaataaaggaggacacaaacaaatggaagaacattccatgcttatagatacgaggaatcagtatcgtgaaaatggccatactgcccaaagtaatttatagattcaatgccatccccatcaaactaccaatcactttcttcacagaactggaaaaaactactttaaagttcatacggaaccaaaaagagcctgcattgccaagacaatcctaagcaaaaagaacaaagctggaggcatcacgctacctgacttcaaactatactacaaggctaccacaacagcatggtactggtaccaaaacagagatacacagcaatggaacagaacagagccctcagaaataacaccatacatttacaaccatctgatctttgacaaacctgacaaaaacaagaaatggggaaaggattccctatttaataaatggtactgggaaaactggttagccatatatagaaagctgaaactggttcccttccttacaccttatacaaaaattaattcaagatgggttaaagtcttaaatgttagacctaaaaccataaaaatcctagaagaaaatctaggcaataccattcaggacattggcattggcaaggacttcatgactaatacaccaaaagcaatggcaacaaaagccaaaatagacaaatgggatctaattaaactagagcttctgcacaacaaaagaaactaccatcagagtgaacaggcaacctacagaatgggagaaaatttttgcaatctacccatctgacaaagggctaatatccagaatctacaaagaacttaaacaaatttataagaaaaaaacaaccccatcaaaaagtgggcaaaggatatgaacagacgcttctcaaaagaagacatttatgcagccaacagatacatgaaaaaatgctcatcaacactggtcatcagagaaatgtaaatcaaaaccacaatgagataccatctcacaccagttagaatggtgatcattaaaaaatcaggaaacaacagtgctggagaagatatggagaaacaggaatccttttacactgttggtgggagtgtaaactagttcaaccactgtggaagacagggtggcaattcctcaaggatgtagaactagaaataccatttgacccagccatcccattactgggtatatacccaaaggattataaaccatgctactataaagacacatgcatacatatatttatggtggcactattcacaatagcaaagacttggaaccaatacaaatgtccatcagtgatggactggattaagaaaatgtggcacatatacaccatggaatactatgcagccataatacaggatgagttcatgtcctttgcagggacatggatgaagctggaaatcattattctcagcaaactatcacaaggacagaaaaccaaacaccgcatgttctcactcataggtgggaactgaacaataagaacacttgtacacaggacagggaacatcacacaccagggcctgtcgtaaggtggggggctgggggagggatagcattaggagaaatacctaatataaatgatgagttaatgggtgcagcaaacctacatggcacatgtatacctatgtaacaaacctgcacattgtgcacatgtaccctagaacttaaagtataattaaaaaaaaaagaaaaaaaaacaaattcacataactataaactaaaggtataaactaaaagattcaacttgtctgtttttgctgtataaatttcatagcagattttcagcgtaggtaattggcatggaaggactttgactaagagccatcaaaactagtcctctttcccagcttcttccctttgcccaaattctttaccttaggtgcctaaggacaggggcttgtatgttctattcttgcatgtccctatagttcctagcagagtgttctgcacaccataaaaatgtaaatgcattttggctgtgtaaaatacatatagcataatctgtacagatgttataatatggaacctcaaagtcatctctatgtccttattccctaaaatctacatctactcaactgtgaaaacacttctatgcctgctgtagcctgtcaatgtctaccaacaaatctcttactcaagacctagtcattttacaatgttttcctggtctccttggttgactaaaaggtagagatggcacagcaacttataatagcataataatacagataataacaggtactgtatattgagtgcttactgtatgcccggaattgtcctttgcactttgcaattttaactcatttaatccttacagcaatcctgttaagctgatattagtgtcactaactaagagatgttctcatctcttagttgagatattgaaggctgacattcaacaatattttataacttgcctaaggtcatgtataggtaagtgagtgaagatttgaacccaagtagctaactccaaagcctgtgttcttattagcaaaactatgctgtatcattatcaaaatgagttggaataaggggaaaacaaaccttgttggaaatataaagatattccttgttctgtaataaaggctgattaaaccatgtacttaaagaccagactgtaaaaagaccacccagaagaaagagactcctaagcaagtgccctctagtttagcagtcaggcagaccctgataacaatttacaaatgactgagaagtacctgcaaaactttagcatttggttgaagaggtttaatgattagctgcttgcctgctgtataaagaaccttttctgaatcagggccccacgctactgaatacactggtgttcctgtaagatgaaaaaagaaaaaaaaaaggctgataaactttaattattatgccttataaaaagagagattgttaagaggatcaaaaaagccatatgaggtgtcatttcatttcttctcttttcaatggacctttcaaattagagtatatagtctgatgttgaaatgctgactgggttaatattgacctttgaaaatctactgtgagcaactgacatactatatttttaactaattaggatcttgctgagaaaatatggagtttttagaaattccatataggtgctattgaaatacataagataaaataaatatacttcatttttaatatataaagaaatagcagaaaagtcatgatttatcatttcccatcattgacagccatcagtatgtatttatttattggcagcaaatgtttttacatttatttgcaactagttcaacaaatgatgttggtttaaagcagcagtcttggggcttggctgcacattgtaatcacctagcaagctttttaaaaatttttatttttaatttttgtgggtacacagtagatatatatatttatggggcacatgagatcttttgatacaggcatacaatacataacaattacatcatggaaaatggggtatccatcctctcaagcatttttcctttgtgttatgaacaatccaattgtactctcaacctgttgtgttatcaaatactaggccttattcattcattcattctatttttggtacccattaaccaccccacctccctcacaaccccctcactacctttcccagcatcttgttaccatccttctctccatctccatgggttccattgttttgatttttacatcccacaaataagtgagaacatgcaatgtttgtctttctgtgcctggctcatttcactcaacataatgaatgaactacagttccatccatgttgtagcaaattattgaatctcattttttttatggctgaatagtactccactgtatataagtaccacattttctttatctagtcatctgttgatggaaacttaggttgcctccaaatcttggtattgtgaacagagttgcaacaaacacaaaagtgtagctatctctttaatatactgattttctttcttttgggtatatacccagcaatggagttatagccatcagtattaaactgactcaatgcataaagtaacttaaattttacatattaaaatacaaatggtatactcaccttataaattaattatcatacctgatgctacaacaggcaatagaacttcccctcacatgctgcttaagcagcagactaatggacagaaataacttcatccaaaaacaatctaataacctcccactcatgaattcacaaatggcaaatttttttatatcagattagggaaaattttgttatctattaggtttggctttagcccaaaagcttggctaaaaaaagctccaatatcttataactagcataaagtttacttccagaggaaaagtacaagtttgatttacctaccactctataaactacattacacttgatagtgttttcaattgccaataggaatttagagacggtatttttaaaatcaattacatttaagtatagtatttcttaccttaattactttctagattacctaatgtcttctggaagactatactttatgtaagcctagttttaaaaaatgactatcatatttattgaaagcattggttatacggcagtaaataatctgttttccacttgcccggcccagctgcctagtcattaggcaggtgaatcaaggttatgtagttaatctatgaaatagtaacccaactatatttacaaaaccatcttttaaaaattgtctaggactcctaaatcagactattgtagtaattgactttctgtgaatcaacgaatcaatgaataaatgaatgaatcattaaggaatttacattcttagtagaatgaaatctgaatttcagggtttgtgggcaatcaataaaatttaattgtttattcaaatgaaaagcccaactgatgatataatcaataaatcaatgtcttactgaataaatttcagtaagacaaatgcttttgtttaagaggtaccctactttttgtgtgctattttctccctaataaaaacacaattcaattgtgagcaagtcccaatggtttatacaggttagaaagtctaatctagacccagtccaaaaaaaaaaaaaaaaaaaaccctgaaacatgtcttccacagttcaggtgttataaaatgtctaaatatcctgtttagtcaatgacatcaaggattgttctgtatcaaaggaacccacagaaattcttcctgatgagatggccaacctcagaaggtactcctcctttttctgtacttgatgagtatattttctgggaatattctctgggagtagccaggagttgacctgtacttcaaaaataaatctccaaatgaacgaagtttaaccttaataaactccccaaaaatagaagtcaaaatttcagatatttcaaatgtagttcttggtgaggactggaaaggagtgacagggacttactagctaaggttgtagaattatataagccatctttatttccattattatagttataatttttgtacaaaaaagtaaattaatgttttaatttatagcctatcaaatcttcataaatacactcagtaaaattatactttcctggcgtgtataccaaactgtgacaaacatctaccctcaaggaaataattcagtaaatacaactcccattgagttatacaggatgtgactttaaggctttagttgtggtaaaaggcacggttggggtacagaatgaggaactaaggactctttagtcctcttaactttaacatttaatttgtggtcccattaagtcagctatgacaccatttccttgtttatgaacctttcttcatagtatttatcttcccttttgggacaaagagataattcatttcctgcttataaaacaaatttgtaaacaataatgttaaagaaacaggtataacttatataataaaagaaaataagcttataaagaaaaagttaagtaattcctttgttataacatgtggtttttaaccacattccttcaatcaaaatacaagcaatggaaacaaataaattatttatttatgataaataagcatggtcaatagacaggactcatagttactctccttaaccattaaaaattcaaaatggatatcacattaaaaaccttgatctttattataatcattccttacacttaaaatattaagcattaaactactgtacatataaacattttcttttctaaaaggaaataaactacatagctatacaactttcaatttgggtggttctaataaagatcattattaaaagtggaagaatcagcttcatgaaataatttgtattattatgaaatccatccactagcatttaaaaaatttatatttcaaatttttaaaatatatttattaaagcatgaattattcccagtgctatgtttcgctttgcaaagtcagcatggaaataacaaacttagcctttgcattgaattactttaaaacagagtttagcaaattatgtaacaaaatgttatttatttcatcattaacaaaaatgggcaaaaaacaaaaaatagctttataataaatagttttttactttttatattggaaattttaatttatgctccatttctgctaagacactcaaaaagatcttgtttttctaactttgtacactaaaatcatgtgacctttttgacattttttaagaaaccacatgcacctggggttgtgttaaatgtcagacccttatctctccataaaacaaattatctaaattctttcaacctgttgaaggcattttaaaccacagaagaggagacaaaaatgtatttcaattgttttaaggaagtacatggtcaaatataccatgtttttcacattcatactataaaagtatcccctaaaaacgctgtttttgtatgtttttaagaatgcctttgaaacaaactgttcactactctaataaattacagtagctatctttgccttgaatgcagtatcggtctatattgagtgaatagaagtaaagtacttggaatagagtctggcactatatagcactatctgttaactactacaaattattttgtaataagcaagcatttgcttactgtattgttcatagtagtagccatttgatttttttttttttctgttttggccaaatcattggcattcaaacacgaagaatgatttccttttcattttatttgtaggagacatgagctaacaatagttaatcaagtgggatttattcaaaaaattccatgctccatgcttacatatatcactggatcaatacaagaaaaagtttaaataaaggcatttttttttaagtttctatcttcaaccacttctcccttggggggtctcaacttccccatagcttcacctttcacttaatgtaacttactcccaaattaatattttagcctttacctctgagctccaacacatttctacttgatccaaagagatctccatcacagagcttcaagttctacatatccaaaaccatcatccctccacatatatttcctaatttatccctctttgaagtctttactcttacagggtacatccctctcagtctctgagaactatccacttttccaactactgttgtcactgcctctattcaagccttaatcgctgccttactagcatagacaatttgaaatcttactggccacctctatttaatctctacctcctctagtttaactttattattactgaaaagggaatctgtctaaaagattggcattatctttactttcctggtcaattttttaaaggttttgtatgcttatagaataaatgccaaaccccttcttttaacatccaggactgtcagtgttttggtccccttggcagtactatccttcacacggcctacactctggcccaaggagttagctcccactcacctgacttttaggtctcacggtcttctgtctctaagcctcttatgatgctaagcttcttaacagcttcactccaatgccaacaagcccatttcctttcccatttcttcattcttcaaagcccagttcaaaagatgctgcaatatttgccaggaacccttcccaatacattcactctccccagaacattaatctccaccctctggtccactcccacctgccaccaacagcaccttaagcacattcctttgtattacaattatttatttattaatttgtattgattgattttttttgagaaagggtcttactctggtgcccaggctggagtgcagcggcatgatcacagctcactgtagccccaacgcccacgggctcagatgatcctctcacctcagccttctgagtagctgggactacagggatgcaccactatgcccggctaacttttgtattttttgtacagatggggttttcccatgttgcccaggctgatctccagctcctgggctcaagtgatctgcccacttcagcctctcaagtgttgagattacaggcatgagccactgtgcccagccacaattacttatatttacagtttacctccttaactgaattcattataggcaagttccatgttttgttgttctattcctccacttgaaaatagtgtggggaaaatgtccttaaaggtttgcagcattactttatatattttaattagagattaaaactagaacaatgacacaaaagatatggcctaagtataattatctctggtgtacatattatttttctctaataaggaacaataaactccccataaataccagtaagaatcatttttaaactaagtcaaatccccccacccaaaactgagattaaagtatcttctggattagaagagaagttaatgactaaagctttttctatctgaacatctggctccaatagtcaagaaatgaattcaggaattaatctctattcatcaagaaataagtataatgaacacacatagacaaagtcacatggatgcttccaacactttacagatttccaaattttatgataattcaggtttatattatttcatttttgtgtcaaaatttagtttctcccttcaaaggaggcagtagtcttgcacccccagctgccttggccttcttacttgagcctttagcatccaactctcagtagttcagatttacaatcaccctcaaaacttgcagtctctaatagatcaaagaaattttataagtaattagggacctttccttttgggttactgtcattataacaacttaactgctctactgatttttccggagatgaaaaaggaaaagtctatgccttatgaggaaagtatagatggcaccaatgattaaacactcaaaaatcagatgcatagttctacagtaagtttgtaattcttagtccagaaaaaggtatcagattactctgttgaaataccaagaggttagccaaaatgggaatatctatctaatttaattctgcttattaatccataattaacaaactttgagaacaataaaattaaaataggacaaaaatgatagtcatttcaaagtcatttgatattaaggaaaacacattttaaatgttgatgggtaatatcattacatgatatgatgaatacataagaaaatcaactgtattatatggtataatctgtattttaccttttaagaaaatcttgtttacccatctatgggagggcagtgagaggaagagcatcaccatcccctctctaaaataaacactgcacacaaaaaccaactcaaaatgaatcacagaccagaatgtaaacactgaaatttcactgtaagtgaaatttttatggcatgggattaggcaatagcttcatcactagaatatcaaaagcagaagcaaattttgtattttttgtagagatggggttttgccatgttgcccaggctggtctcaaattcctgagctcaagtgatccacccatcttggcctcctgaagtgctgggattacaggagtgagccacgatgcctggccaaaatgtcctgatttttaatattgggtctccaccatgctaatgggccagattaagctcagaggtcatctatttgtgatctccaattcttcattgtgaacatgtgcttccaaccagcctttccaagtctggagactctgaatgcattttccccatgagaataaaataagtagcaatttggtttccagactcattatacaggaaaactatagcactaaactactagcactattatcacctaaaccagtgattcccagcctttttggcagcagggactggttttgtggaagacaatttttccatggaccaggtaggggtggttcaggataattcaagggcattacatttattttgcactttatttctattattacattgtaatatataatgaaataattatacaactcaccataacatagaatcagtgggagccctgaacttgttttcctgcaacaagatggtcactgctgggggtgatgggagacagtgacagatcatcaggcattagattctcataaggagtgaatgacccagatccctcgtatgcacagttcacaatagggtttatgcttctatgagaatctaatgtcaccactgatctgacaggaggtgtaggtcaggcagtaatggaagtgatggggaacagctgtaaatacagataaagctttactcactcgcccacccactgctcatctcctgctgtactgcccagttcctaacagacagcagacagctactggtctgtggcccaagggttggggacccctgacatagactaaacaattaacaatgtttatattaaacaacttattccaagtttccattttagactctggaacatctgaaatggtgaatccacaggtagtaaatgggaaggagataacagaaaaattgaaggaagtggaagaagcactgggagggcactggtgaagggtctcgggaaagaattcaaatcttcagactggcacagtggctcacacctgcaatcccaacactttgggaggctaaagcaggaggatcacttgagcccaggagttcaagaccagcctgggaacatggcaaaatcccggctctacacatgtactcccagcaacttgggaagctgaggtggcaagatcgattgagtccaggaggaggaggttacagtgagccaagatggtgccactgtactccagtcgggagacagagcaagaccgtctaaaaaaaaaaaaagaaaaaagaaaagaaagaaaaagaaaaaatcttccatggtggatagtgggatgggcttttagaatttctctgaagatctgtgtcatctacaggcaacaaattgatagaagaaagagaaaagaaaggaaaaacggatatagcacttcagctgctgcacactgtctcagtagtaacagcagctgaaattcttgtagttcttccaaaaggccagtgatctctgaaagaattctgtcaattattcataagtcatttgtcacaaagtgagaatgtcaaataatgagtcttaaaagaaaaatctatgaagccaaaagtaaatccatctgcctactaggagattaaagtaagatttatgttctaaaggtacatttattactaaagtaacaataagttgacttttgctgttaactgaaacttacccacggctacttctatgaactctgaattttctactcatgaataaatattctgccttgagattatctgtagcaaacatttaagcttagaaaagaaatactacttagtatttctggttacctttgctaacattcagttaatatacagctaaagaaatgcaagtgatttgaaccttatcctaaaagtaaacatggttttaaaaataaaatttggaaatttttggaagtcagttatcgaaaatgtttcacaatatgactttatcaaatagttctgaggaatagtcagcaagttttttggcaacctaaagatcagctgatacatactcaggtaaacattaaaactgcttactgttcctatgtaaaatctaattaagaaaatctgttacacagaaaaaatcatatgtaatctaacttccaataggaaggaccattggattgactttatggccactcctttctattaacataaaaaattaagatgctcctctaaatagtgtggtttcagattcttagtgtgtctgttcccctccatcagtatagaaatcaaacatacaacttaatttggaaagggtgttaatattatgaagttatcggggatttttaagtaaggagatactcaatatcttttcgtactatgatttacttaactagacctccaattctatataagatatgcttcaaacgtttcacaattattttttgaaaatatttagcttgtaactgcctttctagagattcactaacataaaaaaaagcccttgagtatttcctatatttcttggcttgaaataatagtgttaccatggtacatcaggtaccaagcaaagaaagacaaaacagtgtaaaatataagagattactgttttgaactcaaccaaagtcagtctcaaccaccgtattagattgtttctaaaggaaaactttaaggcatttttgtattgtataatttgcaaaaatgaaattgtcaattgtaaaacataccttgctgagctaaagttgatctaagcatcccagtctttgaccaaatttttatttgtccatcttctccaactatacagggaaaaaaaaattaatcagtatttttacctatagaaaataaatttaaacattaaatttgcatataagaatcaacagtatctaccgcatattcttttttcttctaggcttcctgaaatcatggaatattactacatatttaaaattcagaaacagtttaaatgacagagtactttataactatcatttaatagaaattacgttgaaacgattttatcaaagtagcttaactttcatgacgaaaatttttatttccttcaatcttagaagacttgtaagtatattactcaaataatgtttcctttgtcactgcagtctccatcttagaattctaagaaaagtgtttccagtgtaataagaagagctgcagccaaattccagtgagttggggactgaatgaagtgaggtaatagactactcttttgaacagctttgctgaaaaagggagaaagaaaatagttgcaggtagagagagctgtttgttaagagagggatttctatttcttcttaatttttaagatgggtgacatccgaacatatttacatgctgacaaaccattggaaaacatgttaaagatacaagtaagagaagggccaattcactgaggaaagtcctagagaaggcccacagtataggtatggtggttttaaaacacatcctcaaattctttcttattcttcacttcaagaggcacagtttaatttccctctcttccactgtgggctgtacttagtgacttgctaagttaacagaatataactgaaacagagtataatatctgagggtacactacaaaagatacagtagcttctacctggctctcttttggatcactgggagacaccagctgtcctatttaaaaacacttaagcaaccctatggagatgcccatgtggcaaggaattaattaaggtctcctgtcaaagccagagaactaatgcctcctgccaacaaccatgtgagtaagacatcttggaagtggatcctccagccccagacaagccttcatatgactgccgccgcatccaacaatttgaccagaacctcatgagaggctctgagtcagacagaaccacccacctaaactgatccctgacccacagaaactatcaggtactatatgcttatgattttaagtcactaactattaagagtcatttgttatgagcaatagaaaactaatgtaataggttgaatcattagagtagggcaggggattggaaacagacagaatggggataatggtcagttaaatgagaatatttggaattttcaaattttaaagaattacaacttttatttattccatacgtgaccattccaaaagccttctttgacagaacagtctccaaaggtcacataagaaaatgattaatataacattctgaattgtaacatttatatagcagtgtagaacaatactatgccaattatttgctattacacaatgaaagacactattgctaaatgaaaatattctgtttctttggaaatttttctttaaaatattcatttcaaatgtcatttttacagacaacttacctgtaactaatgctgttccttcataattccatcttcctgcaagtactgctccacagtgagcttctacacttttttccactcttcctaacttggaaatcagatgaaatttacctgaaagaaattacatttgaaaaatctattttatttattcaatcaacaaagcacctactactagactaagtaataggcactaaaggcataaaggcaaatattaacattataattattcttaatatcacatataaatctattggaaaataggcacaaaaacaaaattatttaaatattttaaaataaattgaaaatgcatatgcttacgtggttcaaaataattatacatgttcataacagggaaaaacccaaattcataaaccttttgatttagttaatacaatttaaatacctatggtctgggtatatgtctatgcttcagaaacgatgtgccaataaatataccacacctatggatgagaaagtgttttaaattaccagctgtatattactagacttaataatcattcgtaaaccacaatgatcctttcttggcttcttgtatcacttattctttgcactgttgacttgtctctctgacatctcttatataattagcttatgtcctttaaagttttacagtgtttttactttttgccaatatatgtacatacttctgcaactaagtggcttgcttttgtctacctgttgcctgacacagtataaaattatataaggcaagtattttaaacttgggattatccattttattattttggttcttctcctttataccttttccagcttttttatagcctataaaaaaaaaaaaaagtaaagactgcaaaattgtgcttaaatggaagactttcttgacatttctcttgaccctcccttggccacatcacaacagaattttatgcccctctgatttatcatagcactatatacatatgtctattatgttatttgtttcaaggttttatattcacagttcttagctctgtccattgaaagggccttgaagcaaatacaccccattggaatgagcacagctagcactgttatcttgtttttttaaataccatcaaccaccagaaaaagaacaggtctctgtggaaaatggctgatttgggggctgggactaagaaagtacaagataagcctggaacatcttgtgccagcaaggaagtgctcaaaaaattatgagaacacatataaaatttaaaaaaaaaaaatcactgtagctggcttgatggggctcccactggccaaatctagggcacttttaacatcaaaatttaaaaatgataataataatatatttatgaaataaaatgagaatctacaagtctaatctgaccccaaaaaaacaaataaatatatgggcatgggacaggaagctcttccttggagtagaataccaactaatcaatatggaagaaattacggagttggaaaaatcaccatttggcaaactatcttagtaataaatgactcagccaagagtcatcaatagatgctaagagagtgggaggcagtttgatgaagaagataatatttttacatagtctcaaagtatcttttcataaattattaaaaggaataaatagtaactttacagagattaacttaatgaacatgaacttattaacttataattaaggttaacatcaccaataatgggtcaaaccaacatcataaatctcctagtctgatgccccgagtattcctgctaaggacatataaattgaatctaatcatgaggaaacatcagacaaaaacaaattgaagaactataaaataacaggcatatattcttcaacactgtcaagatcacaaaagactgaagagttgttccagattaaaggaagctaaagagacacaacaaaaacaatatgttatcctataccagcaaaaataaacttctatggaaaattagaatgattgttaaaatttaaatataaactatagattagataatagcattgcatcagtgttaaatgtcctgatttttatcaacaaattgtggcaatgtaacagaaaattcttattcttaggaaatgcattgaagtattcatggttaaaagtacatgtctgcaaactgctctcacatctttcagaaaaagggtgtgtgctgggggcgaggagggtttgtgtaaaaagaaacagagccaatactttgtcccaacatatatgggacaaaatgttaaactagtgaatctggataaaggacatgcaggaattgtttgtacaattcttaaaacttttctgtaaatgcaaaattatatcaaaataattgtttaagtcaaacactccctttatcacctgaggtaaactaaattctagctgtggttcagggccaatcttctaagtgccaggcactctaccaagtgattttacacatgtatctcatttaatcaagtttctgaaaaacaaagttttaaaaaactaccacaagtctctcggtaaataaggtgtaatctgatactactgtttgtcctaacatcctttccatcttcaggttacaaaagccctcttctctttctcttttcctttgcatgtggatggcctgaggctggatacgctcaatcagtgtcccattgtctttttttctttttttttttttttgagacggagtcttgctctgtgcccaggatagagtgcaatggcgcaatctcagctcactgaaacctctgcattccaggttcaagcaattctcctatctcagcctcccaagtagctgggactataggcatgtgccaccatgcctagctaaaatttttttgtatttcagtacagacgggggtttcatcatgttgctcaggctggtctcgaactcctgacctcaaatgatgcgcccacctcagcctcccaaagtccatttctcttgactaaactgattgactcagtgatgggcatatgacccaagctcattaagggtccctctgcaagctgcctgcacgagatactgaggaagaagcagtcttacaaagtatgatgagccttgggctactggccaccgtcatactcaccatcatgttcaccatgtgcagagagtctacccaagagatggtgagaacagggacccgatgcaactagtgcttgatctacccctacagctaggtgaaccaaaaaactccatttgtgcttaagttagccaaataagtttctgttactttcaatcaatgtactcctaattgaaacagcaggtaaagtataacacagatgaaaacagttcacgtatttctaagaaaacaaatataaaaacatacccttaaaaagtgaaaaaaaaaatcatacttgttattcaccaataagaaagctgcggtcaaattataaaactcttcaactctgtaactgaaaattaacatgtactggaaaataaagtatgtattttaacagataccttactaaatgaataggtatatcttttcagtgtggttatattaagttaaatttgaagaatttaggaactaaaactatgataacagcttaactcaactcataagagtactaaaaaagtaaagccagctgggcatggtggctcatacctgtaatcccagcactttgggaggccaaggaaggaagattgcttgaggccaggagtacaagactagcctgggcaacaagatgagaccctgtctctacaaaaaaaatgttttaattaaccagatgtaatagtgtgtgcctgtagtcccagctactcaagaggctgaggcaggaagattgtgtgagcccaggagtttgaagctacagtgagctatgatcacaccactgcactctggcctgggcaacagagtgagaccccatctctaaatatatatatatatatatatatatattaaagccaaagacccatattcaatcctagtatatgccagttaaactaactttcttccatgacaataatttcatagcccatacacaaaccaagtgactattcagaaaagaaatacaatatgtggataaaaatatgcagatccacaaataccagttttgtaaaacaactcaaagcataaatcatactattaagtcttttaaatacaatggcgagcatataatgtttatttaaaacttaccatcagaacttgtgaggacaaagctttctgcctgggtttgtttctttacacccaaactttttggaaaccagtgaaaatcaatagggtaaatatcatcaggaagctttactatttgagttgtttcactggttaacaagttccacttcactatctggtgatcatcactacatgaatacagctcttcagcagtagtccagcccacacagcttactaattcttgatgtgtcaccatgttaaagagacataaaacatacaaaagtctttaatcttaatgaataattcacagatgcagattataaggtataagtaaaatagggtcaaatggtttcaagattctaaatgtattttccattttatgactggtatttttttctatataaaagaaaataagcatctattaaaagaattgtaaaaatggaaagcaagaaagaaatccagatgccaaaaggtgggggagaaaagatctgaccacatgaaaatttaaaacttgtgttatacaatattctatacacaaagccaaaaggtatacaaaagagacttagtagatcaaaaggtatcaaagaatctacactgaactgttgggggataggtagggagcaaagggaactatacttttttctttatatatgtctgtatcatgtaagttattaaaataagcatgtattcttttgctaaggaaaaaataatcaagtgtcaaaacaagactgaaatctaacagtaggctatccttttcaatcacatattatcataacaattcacctaggaaagaacttatggtttaacagctgaaactaaaatcttaccaaactttttttaaatttttcattttatttcttcacttatttttaattgacaataccaaactttcctacattaaaattaggaaataattcaattataatttacttcacttataagatgcatagtgctggatgagatatgatccctcaaatttttactttatttaacccattttttcagctctaatttatcagaagaatttctatgtaagctgagatgctcaagtagccctcacttcctccatcaggacagggtgattaccctagcagaattgtgtacctaaaaggcatttcagtttgttatttacaaaggatgttttctcttgctacgtctggatttctatattgccagattattcctggttgagttgtttgttcttattgttatgatataatccttttatttccttcttttctcaccaatacttttactgtcttatctgagcaataatacaattgctttttctaaggaaatgcagacaatgcgcctaattattctaggatgttccaagattttttaatacttcaaaatacaatagattaagcagaaaccaaaaagataaagagagattatagaaagatcttaagagtctgcacaaaaaggtaataaagagacaccagaatactcaaaactcaaaacacaatctaaacaaaaggacaacagaccattcctgaaaaaactgttgtattattattgctgtcgcctaaacaatgttaggtaaaacctaaaatgggagaagcttaggtaaaacctagaaaggaagaaaactcacacaaacaaatatgtacacatctcaaaccaaaaatcattagcttatccttatataaattgctataagtacatgccagacgtccatgacattatcttcaaactcacaggtcaactaaaattatcgtagaaatgagaagactgccagatcaagaaagtctaaaaacattgttattctttggcttgaaaggtaaaggcagacagtagacatggtcaaaatctataaaattgtgtatggtgtgaactcttgaaagcacattttttttgaaaagacagtaaaaactatttaagggggaataaaaataattacatcttcacttaatagttaaataagcaaacaagataatataaatgaaaacacctaccaatttaaaatgtctgaccaaatgtttaaatcagtgctttcctagttctgatgaaggaccagatttttctttatttcgaatccattgcatatggatatttcgtaagatacaataaaaataaaatattagaaaaattggacattataacaatgtcaaattgctacaaaaatttctcagcccttactttcaatttatttacctattctttcacagacctgcaataaagtctacaaaggatactttgagcagaattagtctaaatgtctaagaatgatgatagtggggcctgtcatatctccttgacacataactggggactcttgctgacaaaatatagggtcatgtgtttgagaaaatattattaattgccaccttcccatgtgaaataatgaggatctgactgctcagatttccccaacttgtccttcactttatcatgaatgtaaagaaatagagcacagtggaatgaatacatgctagatcacactagcaaagaaacagtttggtttaaaaaatgcttcattttggccaggcgcggtggctcatgcctgtaatcccagcactttgggaggctggggcgggtggatcacctgaggtcgagagttcgagaccagcctggccaacatggtgaaaccccgtctctactaaaaatacaaaaattagccgggcatgttggcgggtgcctataatctgagctgctcaggaggctgaggcaggagaatcacttgaacccaggaggtagagggttgcagtgagttgagatcacaccactgtactccagcctgggtgacagagtgagactctgtctcaaaaaaaaaaaaaaaaagcttctttttaagatcctactaaagtaaacaaaaactgctttttaagtatttaagtatagtacttaagtagagtaagaaaaacgtcagtaagaattttaaaataagatttatagcaaacggttcactttggagaattacttacaacacatgatcttaaatactttaaaacaatttaggtaaacagccactaaaggaatgaaaaaaaaaatctattcttcaactaggatataaaatagagaaacttttaacaatactataattaagaaaatccaataagatttataagcattaaaaggatatgctttggttcttttaaaagagatatctttagtctcatgactccacttccagcaaaaatttaagatgccacttgattgtatttactgtaaaaataaaaggagagaaaatataaagtcagcattaaaaacaaatgtacgtatacaaacacaaaaggcaaacaaaacatcattgcaccccaacgagcaccttcagtccttctgacatcaagtacatggaaagagaaaaaaaactagtgggtgtgccaatcctaacaagggatgacggagagctttgggctgaaccccaggagtcctctaaacctgcctgagacagatctacgcagaacaccactaggtaaatctggtcaggtaaagaatttccatgtcctgaggccaaataaaaagattccacaaactgggaactcttcaattgcaaatcaattttggtcctgtctattggatacaaatatccaaggtgtgattgagggctaagctacaattctagaatccatgtggaaaaatacaacatcataaaactagtggcccaatctggggttgacattctgcagtggggcagatacactgcccaacagttacggttaccacagtgacaatgtgaaaaataggtgacttatttaaggaagaggtaataaattgcttataaaagttatgtaaaaatcacagtgtaattgccacataaaaacttaggaaaagaagaataacattccccaaacagccatatcatcaaaagacacaaatcattgctatgaatatagttgttgtataaaaaaaagagaaatcaagaaaatgctaaattgtctgagtccgatttacatttacagaattctgagtaacatcactaacctaactaggcaaatgtaaatcaaatgaaagtgtaattaaagggaaaaaatcctctttactaagttgaaaattactgctaactacatcaaaggaggtactgactatagataagaattcagtaggcctctcttagataatttctcattctcatgaatccaagaacctttagatcagcaagctactaaataaagctgtatttcaaagcactcttttcacttctttctcttccagttctcttaaggtgatttctgttgaacttcaaaagtatgaaactatgtggagcacagccagagctagaatacaacgtctcccaggcacacttcttaagttcacttttttggtctttaggagttctccaccttcctccaaactccctcttccatcaggcccccaccaattagacaggggaaaaaagactaataacattttacgaaatgctgctttttcacaataattgaaatttactcagcttataaggattttaaaagaagaaaggcagataaatatttgcttctggaaatgagaatacaatagataacaacaatacacataaaaactgaatatactattacaatcagaaacttaaaagacatgatgttattctacatcagaaaacctcaaactgccaaaatccataataattaggataattcctgatgagaataaatcataatcctctataaatagtagaagcagtatggtttttacaagaaaggaatcactaacaattcagaaacatcatgccaaggaatcagagaaagtaagacaatggcattctaacactgggaagattctcccttactcagaaagattttcctcacacaattccatttatctgagaccatctgtatgaatgacatgtgtactttcatgtgggattgaatgagggaataaaagaaaagtaatgttaaaacatagccaatttggggaagtgcagagctgcctgaacgctgcattgaggtgtttttatctgcctaaagggattgatcatgaggatctgactaaccagtggtattggggcaggggttgggtttagataatagaaagacaattttgagggtataggtaactttgcaactttacatagggagcaagtagcagcaaccatgtctttgctactaaaaatcatttataagttgtttttggtccagtgtgggtcaacatttatgaggcttgagaggaaaaaatgggcccaacgaaatctgagagtccaaccactaaaatacacagcaaatctggtcacttctcagcacctccatcataatccaaagccaccaccatcccctgcctcaattattgcagtggcctcaaaattgatcttcctattcctacatttacccctacaaactattctaaatacaccagccagtaattcttttaaagctaagtcagaatatgaaggccagtatgcctaaaataaaatgagtgagggactggcaggaaattagggaaggagagggtgggacacaacatgcagggtcttggaaagtcataataaaagctttagtttttcttctgaatgaaccaagaagccagtggagaagttatgagcaaataagcaatatgaactgacttacattttaaatggatgcaatggatggtatacaaaaaagagcctatcaggagggaaaatgaataagactggacgcagtaagaccagttaggatttcaataccccaaaagagaaatgaaagtgacttagataaaggacaaggaaggcaacagtacaagtagcatgaagtagtcatatgctaaatatattttgaggaaagattccagaagatttgctggtgaattcagtttaagaaaaacagttgtggccgggtgcggtggctcacgcctgtaatcccagcactttgggaggccgaggcaggcggatcacgaggtgaggagttcgagaccagcctgaccaacgtggtgaaaccccatctctattaaaaatacaaaaattagccgggtgtggtggcgcatgcctgtaatcccagctactcaggaggctgaggcaggagaatagcttgaacccgggaagtggaggttgcagtgagccgagatcacgctactgcactccagcctgggcgtcagagtgagactcagtctcaaaaaacaaaaaagaaaaacagtagtaaaaaatgactgtaaagtttcaataggtggaatggagttgccatttattgaaatgaggaagattgagaaacaggttggaatggggtgatatcaaacattctgttttggatatgttaagtgcaaggtttctattagacaacccaatggagaagtcaaagagaaatgagatataatacagtaagtctggagtcaagtgggaagttggagttgcagatatcaattagatatcaatttgagggttgtcagcaaaaagatcatattcaaagccatggaataagatgaaattaccaaagagactatgaaaaagtggtagattcaatggcctggaaatcctactgaagtctttagaattgttggcattaagattccagaagaagttaactagcaaaaagaagtggagatagacaatgggatacttaaaacagattttagagccagtatagatattggtaatgataagataggttatgactgtgaaagtgggtggctgaggtcaaggaactgacaggccagggatttatttgtggacattttaatgatgtcaagataatgacaagaatagtagtagagataaggacaattagccgcatgctaaaatattcattgaatgagggaagagcaaagacatatgcagatgaccgcataaaagcacagcagagaatggtttaatctggtaggacttgtttctttttttttttttttcagtggcaaattcttccaagcatttaatgaaaaaatcacatcaattacaaacaaactcttccagaaaagataagcctaagaaacattgtccagaacattgcatcaatacaccaccattactctgatatcaaaactggacaggggcatcacaagtcaagaaaagtacagaaaaatatccctcaggagcaaaaatgtggaaagccttaaggaacttttaacaagcagaatctagcaatatatactaaggaaaatacatcatgaccgtggtaggcaaaataatggtctcagaaagatgtcatgtcctaacccccagaacctataaatatacatattatattattatatatgtaacatataagtatattacataaaatatatttatgtaattaataatatataaatacattctatataaatatatatagagagaaaacgttaggtagctaaaaagaactaatgtttcatatggaaagtaaatttcatattccagtgatcttaaaataggacaattattctggatcatccagtgaacccaaataaatatacaaggcccttaaatgtagaagagggaagcagaagaaaagtcagcatcacagcaatgtgacatgagaaagactcaactggccattgctagcttttaagatgtaaaggggttacaagcctagtaatgaggacagcttctagaggctggaaagggccagaaaacaaattctcccctagagattctagaaagaaacacagttctgtcaacaccttgatatcaacataacccaagtcagatttctcatctacagagttgtaatataatagagttgggtatttaaagccctttaatttatggtaatttgttacagcaataatatgaaattaatacatgggccttaatgggtgggaccaagaattaaagctgagataagccattatgaggttccattcaacctttccaggcttaagaacaggccaaattgaactgttaaatggagaagtgatggggataattaccctttttctaaatagatctcataatgattttcagtcatctacttagatttatatagaaaaatggtgattgaaatcatccttaaaaaatgattttcaattttttattattattatactttaagttttagggtacatgtgcacaatgtgcaggttagttacatatgtatacatgtgccatgctggtgtgctgcacccattaactcgtcatttagcattaggtatatctcctaaagatatccctcccccctccccccaccccacaacagtccccagagtgtgatgttccccttcctgtgtccatgtgttctcattgttcaattcccacctatgagtgagaatatgcggtgtttggttttttgttcttccgatagtttactgagaatgatgatttccaatttcatccatgtccctacaaaggacatgaactcatcattttttatggctgcatagtattccacggtgtatatgtgccacattttcttaatccagtctatcattgttggacatttgggttggttccaagtctttgctatagtgaatagtgctacaataaacatacgtgtgcatgtgtctttatagcagcatgatttatagtcctttgggtatatacccactaatgggatggctgggtcaaatggtatttctagttctagatccctgaggaatcgccacactgacttccacaagggttgaactagtttacagtcccaccaacagtgtaaaagtgttcctatttctccacatcctggacttgtttcaaagggaccaggagattttagacaggaaggagaaacagaatcaactgtccagatacagtaacgagagataaaactctgacatatgggagtttgggaggcaaaatagcttctacttgagagatctataagaaaagcagtttccagggacaggcatggtggctcatgcctgtaatcccagcactttgggaggccgaggcgggcggatcagctgaggtcgggagtttgagaccagtctgacaaacatgcagaaaccctgtctctactaaaaataaaaaattagctgggcatggtggtgcatgcctataatccctgctactcaggaagctgaggcaggagaatcgcttgaacccgggaggcagaggttgcagtaagccgagatcgcaccattgcactccagcctgggcaacaagagtgaaattccgtctcaaaaaaaaaaaaagaaaaagaaaagaaaagcagtttccttaggaaacaaccagatttaagttagactttgagagtaaagggatcattcagaataaaagtggaggactgatttggctaatgacacacagtgagttccaaaaaaacttagatggtgaagaactaatggtttaagatagatggttggagatggtagaaacagctggctatcctgcaatatccattcatccctgcttctgtggtatgaatttgaagttttgctatacatctggccacctagaacaaagactatgtttcctagctgcccttgaaactaggtgtggccacacaaggcattaataatactgaaaccaacagtggctattataatatcatcaacctactggcccaatctggattttatattctgtgaggggtagaaatgaggtaagaggcaggactcaactccggaggcagagctcagacacgggaccagattggggactggctaaaacacagaagaggtgaaagcacctctctgtaagaaatgcctatcagtatgccatatcagtttactattgccatggtaacaccaggaagttacctgtttttctagaaatttctgcatagcccacttcttaatttgcatatagctaaaagtgggcacaaatatgactgcagaagtgcctatgagctgctcctctgggcacactacctatggggtagccctgctccgcaaggaacagtacctctgctgctgctatacactgctgcttcaataaaagttgctgtataacaccaccagcttgcccttgaattctttcttgggccatcccaagaacactcctgggctaacccccagttttggagcttgcctgccctgcatcagatatactgcccaacagtaatagtacgtacctaagttcacattgcctaatttcacagtgagttatctaaggaacccatttcattacttcttataaacgttacataaaattgcccggcacagtggctcacgcctgtaatcccagcactttggggggccgaggcaggtggatcacaaggtcaggagatcgagaccatcctagctaacacaatgaaaccccgtctctactaaaaatacaaaaaattagccggggtggtggcacacacctgtaatcccagctactcaggaggctgaggcaggagaatcgctggaactcaggaggtggaggttgcagtaaaccgagatcacaccactgcactccagcctgggcaacaaagagagactctgtctcaaaaaaaaagttatataaaatcacagcataattggcaaataaaaactcggaagagtgacactccccatgccatgccatcaaggccatgtataacacagcaagataaaaaagagccaagatttctgaccttgtggaaagtcacatcaatcctgtaccatcaaagttttaagtgatagagaatagttgcatcgtatttaaattactgtcatcaacagctaatcctaataacaaactaatgcagggaattatcttgaatgtggagactgaggtaaacagggatgtaaggtatgacacagtagtcccaaatgtctcttgagaaaaggtggctaatcaatttaaaccatagccttcttggaactgctctcttaggcagcattgatacagactttcataagggaaaaaggggcagtcctctagcagcatatggaactatgtgggatttcttttcaatcttgataagggtgttggcatttacttcactagcagtttaaggagggaaaggaactacagagaattagagggaataaccaaatgttactttctcctaatatccccagccttaaatggtaggctcagtccttgtgcctcttctgtatctgcactcactgccatggtgaactcatccagttttatagcttaatatgaatgtaaatatattcaccatatagtgacaactactaatttcatatttctggttcatacctctccactgaaccccacacttttatatctatttgacaactctatttgaatgtctaacagacatttcaaatttaacaagatccaaatcaaaaccgtgattttcccttcaactttgctcctaccacattcttacccatcttggtaaatggcaattccattcttccagttacaaacaccaaaaacttaagtcatcatttactcttctctcacataccaaatccaacttgtaaataaaaacatttgttggctttatcttcaaaatgtaaaatatttcaccgcctccactatgaccgcaatccaagatgccatcttctcttaaccagaattactacagcagcttcctaattagcctctgagccactctacaatgtatgctcaccacaacagcccatgtggctgatttaaaataaaccacagccaggtacaatgcctcacacctgtgatcacagcactttaggagaccaaggcaggaagactgcttgaggccaggagttcaagaccagcctgggcaacatagtgagacccccttctttacaaaaaaataaataattagccaggcatggtggtgaatgccagtagtcctagctacttgggaaggctgaagcaggaggactgcttgagcacaggagcttaaagttacagtgagctatgttcatgccactgaaccccagcctggccaacagagtgagaccctgtctctaaaaaatataaattagattaaataaaccactgctgaacactcttcagtggcttcctatctcacccagagatttaaagacagtttctactgaaaagtgctttcctttcacaccatcataaagtcaatataaatcatgtcaaaccatcatagtctgagactgtctgtatattcaaatctgttcattacagaactctgaaatactatcaaaaattagaaatttaaatgttcatagattttacatccctgtgtggatatatgtgtttataatatggaagggttaaaatcaagaaaatataattaagagttagacctaagtaagcattatgctaattgaaaaaagctagtacaaaaggacaaatactgtatgaattccacttatataaggtacctagagtagtcaaattcatagaaacaaaaagtagaatgatggctgccaggggctaggggaaggaagaatagggagttattgttcaatgggtacagtttcagttctgcaagatgagttctgtggatggatggaagaatgaatggatgtgacagtggcacaactgtggatatacttaatgtcactgaactgtacactttaaaaaaaagatggtttttaaaaaagaaaataaaagaattagatttaggaaataaaactaagaggtaaaagcactaacaataagaaaaattttagatgataaacagggagaccatgacttgtcaacaagaatgtacctatagataagaagtggcagaaaaatctctagtagtgaacaagaatgtgaagaatagataagaaattcaagagctagatcacaagcatatttataccgagttttctttgggtcacttgcatactagttaatagagaaagcaggctggcttattactaaccaaggtcctattaaaagaagtacagtttttatcaacggtcccctaaattgatagctctgaccagactcctgtgtctcttctccaatagagaaagaagaaaggagaaaggcaagccttttattcagattggtgccatcacagaacttgcacacttgagctgagatctcttgtacagtagaaaagagagagaagcaggctcaccatttccaggcacggactcaaaggcttagccacagcaaacagtatggccgtttactttatcaggggtgtccaatctttcggcttccctaggccacattggaggaagaattgtcttgggccacacataaaatacactaacattaatgatggctgatgagctaaagaaaaaaaaaatcacaaaaaaatctcataatgtcttaaggacatttacaaatttgtgttgggctgcattcaaggctgtcctgggccgcatgtggcccatggatcgtgggttggacaaccatggtttaattagtaaagacctccaactcccaccccatctcaattcctgtatgcatttgcgaaagtgtatgtgtacgctgtggtatttacatttccttgaaattctagctatgattaatagccatacttcaatattattcgtattggctatacttataatgaaaattagctgggcgtggtggcgggcgcctataatcccagctactcgggaggctgaggcaggagagatcacttgaacccaggaggtggaggttgcagtgagccaagattgtgccactacgctccagcctgggcgacagagtgatactccatctcaaaaaagaaaaaaaaaaactattttaaaaatgagatgaatttgtacatgttgatatagaaagatgtctatgttaaatgagaaaaccaaggtatacagctgtattatatgattcaattccttttgtgaaaagaaaaagtgagatatatttaagctggtggataccaaaacattttctgggaagatatgcaagacacttaataatggagacccctaaaagggtgggggcactgggatgagaaggaaagctttaaattctaattttatatgtttctgttctgtttgaagttttcaacaatgctcacagtattatttaatctatccacttatatatttaatatagaattatctgagtgaaaggattatgacctaatttttatgcatttctgcatttctataaaaccctaataaataatatttttataagatcaccattctccacacttgaatccccttcttattaaaactctcacctggcttatcttcatgaagatactatactttgtttactttcttatgtaaaatgaggctaataatacctacctgacaaattagttatgatgattaaatgagataaagtatgtaaagtgtccagtagagtacccaatacacagtaagcacttaataaatgttagtatttccagtgaaagttgttttttcaccctgcatatatatagtcactcttttcccacctaaaaagaatttctctttgcaacaaccacttcctcactgttagcccatgtggcatgaggcccagacttaagccaattagagcattccattccctttgcacagactgtttcacaggtggcccaggacttttattcaaatcaatgctggggaagagaaactctcattcccccttggattttaattttagaagatatgaggctggagttgctgtagctatcttaccacagcaaggggagagccaaaaggtgctagaggccatcatacggaacctgaaaatactgccaacacaatggagttcaaagcaaggaaagaaaccaaatccttgtgtctttgtctgaacccttaatccagttatagtcacctgactttttagttccaggagacaatatttgttttttctcaagacaatttggattgggttttctgtcacttgtaatcaacaggctcctatcctagatattactgtaattatttcttcttcttacattctaaaaatgaacatttccttaatatccttggtctggtgctagcttctctccacttacaatcttaaaaacctaacctatttttagtgatccagttattcttacagcactacccattttattttctctcttaagccatactctctacctctactgcttgttgaatatatctttccagaattccaacctacggaataaaaacatacttatctttcaaaatgatatttccaaaaaagagctgttctgccttctagcttcctgggttttcggtgataagttatgtgtgtttcggtaacattaatataccaaggtgcttatattatcaagaggaatattcacttctatctgcactgtgtctatatctaatttattaatcttgaacaatattctctaaatatttatacaatacttacataaattcatattagttaatatctaatttatctaaatatttacaattacaaatttaatcttttaaaatatttactcagaaatctaatttcagcctttctgaaatgttatgacattagaaggcaaacaaaacacatattgttaaaatgatgaaaaaaccttgcacttaaagaactgaaaatgaagattttaattctaattccaatttttctctttgaacttatttcttcctgtggggtataatttttttctaatgtaaaaagtgaggttttccttctaagactgcctgaaattgcagatagagattactgacagatcattttagactaggaagataagacccagttatagcaatactttccaaaatgactgtaacccagtcttttccaggtaggccagcttctctttgtaattaaactctgttaatttcatgagacatgtccaaaatattggcaacaatcaaccaaaagtctttatttcttgtgactctaatatcttctcaaaatttatacttattctgaatgtcttatttttgtggtatatataaatctccagatttaagtctactctgtagctgtttgttatgttttctcattatacaacctggtttatgccccttttcaaaatagttttctgagtgggcaatggttaggttcaattaaatttaaggccatcagtcagttgatttatcaaaactatattttctgtgacttatcgttcttcctataccttatcactaattcaaggatacacaaagaatagtatatgactgacttcaagggtttatactctgaaccatcacaatctacaaaagctatagatttttaccccaaaatgactccagatttttttccatcctacttaggcacttctcacttactgttatatagtaacaatcttaactaaagcctagactgatctcagtttctttcccctttaacataccccacataactactgttaattattcttcctatatttaccaagtcattccttggctcagaattgttctaaaagctgtttcctccatatcatatctaacatccttgacttggttttcaagatccttcaggagctacccttcctctaacttgatatcccattattcatccttagcatactttgataagttcaatgtcataaacacagcaaaatcaaatccttatggagcatgtgctagatgaacaatcataaacagtatgatgagacaggtattatatgctagtttcataaataaatactctcaagattgacaaactgaggaaactgtcaagcatatacctaaaaaatgatggaacttgggattctgttttctatattacatctttccactacattgtgctctgttgccccaaatacaccactcaatttggtctatacttttttttttttttttttttttgagacgcagtttcgctcttgttgcccaggctgtagtgcaacggcactatctcggctcaccgcaacctccgcctcccgggttcaagagattctcctgtctcagcctccctagtagctgggattacaggcatgcgccaccatgccctgctaattttttatttttagtagagacggggtttgtccatgttggtcaggctggtctcgaactcccaacctcaggtgatccgcatagttgatacctccccaactcaggttttgtagtgttttacaacctttggaaatgcaaaaattccagaagccctcaaagataatccttatatcttcttggtatgcttaccagccaaaaaactttttttcattaaggtttattttctgtagcttgttttatgaaaacaacaattcgtttttaacttcaaacataaagatatatcacgatattgagtctacgcttatgcaatacacaccagtctcccaacctcaccaaattcttacaattggttgggaggggggtggctctccacacctttttgagaatcactgaacctgacttcatgctcttccagggaagaaccataatgtatttagagtgatcatgtaaattcattcaaaagggagatttaatggtgatttaacatgccagaccctaagtaagcaaaagttaaagaaaaaaaaaggaggctagtagttctcaatgtcaagtacttaagagttgttgcatgaatactggagatagtcaaatgagccagtggctctttaacaatatagggaattaggagcaagtatgagattctgattataaagttgtaggaaaactaacttcccagaaaaatgcacatagaattatgtatacaatgtcaggcgagttatgaactctgaagcccaatcacctaccaccagatccacagacctcaggttaaaaacccactaaaactaagttctcggggaacaggaatcgccaaacttgcttactaattctaattatgccttacccagggcaatgtatacaaacactacttagggaatatttgctgatcgataatttcctcataaaaataaccataacactggcgagtcgttttttccactaaagagccttttagtcaaattattttaaaagtcctaaacctttcactagtaacaccaatgatctcgaaaatcattattgcgctattcacatgtcgactaagctatcacgaatccaggtcttccagttgtctctctactcccttaaaatttagggcttcctccttcgcatcccaaaagctacacccggagccccgctgccgccagggagacagaaaatgatgctccacgaagcacacagcttcaaaacaggaaagatgggatccagtgatggctacaacttccaaacccttttctcaccaggtccagaggtgaagggatttacctcaagttccaggaaagcggtggcgattgctctcaaatacctggtacctccccgtcaccatagtgacttctaagagttacgctcccttcctcttcccgcgatacttctacgcggcacgtcatccgagtgggcccgagaccccgcctctcggcgagcccgccctcttctgaagaggcgtttctggaccactgagccccgcctcccactgtgagcggaaccctaccgtttttaaaaaaatctttttcaaaacttgccaggttgtctttccaaatatttttaataatagtgctgctgctgtagaccacagagaaaagaatccctcgctcttccttttcacttagtagaaacttctaccgcgtaggtcccgccaggagttcgcgcatgcgcaggagcgacaataagatggcggtgataatcgccgcactttttttcaaattagtggatcccagaaatcattgcgcgcatttgtaacgaatttccgttcgagtttgtattttaggcgccattttcgagtgaaggacccggagccgaaacaccggtaggagcggggaggtgggtactacacaaccgtctccagccttggtctgagtggactgtcctgcaggtaaagtacttctcttcctggtcaggttgtcacgctcttacttcctgccttgtccgcgagcgcctggaaaatagaggccttgagcccgagcggcgaagtccgggcttgaagctgccgctgggagatttctcttgctgtcacccctcccccctcggccgctccccggcggcccgggctcccgcgcgcagctcccgggcgccacttttccaagctactcaaatgtctcggggaggccctgagcctcgcagatcttttctttaaaaaatcctagtctctatctggaaaagggcgtctccccctacccctcttccttctgccaacggactagtcaccgggtctcagccttcgctggtgacctttcatggtttactgtccaacgggactccgcctggggagctggagagacaaactcttgccactccaaaattagcaagcgctgccagcgtccgacttgaagttgctagtggttagtcccagccttcgcccttcgcggtccgaccgctgagaggagggagacttcgttatgccccgggccgtcaacggcgccaggagctaaagggcgggcagacgaaagcgggcggcgagtcgccagttagtcttcaccgctctggagagagttgctagccacgggatcctgacccggacacgaactcgtttctccacgtcggtgcgcgcttgcatccctggccccgaaagcgtgggaatgtccggaaatgctggcgtatgggagttccttaattagaaatgcgttagcgaatattatacgcttatactatgggcggacgggtggagagccttaaaaacaacaacaacaaactaagcagttgctcaatcgttgattgatcctcaggcacgtctagattttcccacttacataggtcttgttaagaaaccagtcctgccttcttgccactcgtgtctttcgatggctcccttcccgaagtcccgctgcctctaagcggagtgttaagcggggctctcggaagccggtggaccgagatttccccgggtggggcgggcgcggtgtagcggcccgcgggctgacttgctcccggctgtcccccggccccagcgaccatgccccgtaaaggcacccagccctccactgcccggcgcagagaggaagggccgccgccgccgtcccctgacggcgccagcagcgacgcggagcctgagccgccgtccggccgcacggagagcccagccaccgccgcaggtgagtgacccgccgcgactcggcgggaacgcgcgctgtgggactggcaggcaaacgcgcccagcccgaggctggctggggttgttgagcgcggagttgacatctgaaggtccggtgtcggtccggtagaggctcaggaaagccatttggcaactttgagataggattcccgtgcaattttggtgtaacggcgctggaagggatgggggcgagcaaacgggttcagttgtgaatttttgtttgtgacctgtggaatggtacaggtcacaaacaaaaattcaatatctttattgtattcccgctaaaatcgagacggtcaatcaagagagcaagtggacttttttcccagagacaatcaatatgactatgtgagcatgatgaaaagttttttgaccctaacctcacctccgtggtgttagattgccgttaaagagaagacgataatttatttgaagccactgtagcttttgtgagtccaggagttgggtgacattattaaaccctcgtggcagtgtcgctgaagttcatgagtttccaaaatgaaggttccaggtgctcagcggtacggagaattgcatctagagccttaggatttaacctcctgtttaggataggcagcaggaaatagcttgttacggttttcccagatttgctctatgatgtagtgttttgactcttaagaggtataggtgtatagaattttgtgaccggtggcatttctttcaagaatttcttttttagtaaaaccaagctgaaggtttagtcacccccgtgagtttaagataataacatatttaagtggaaaatatagactcctaagtttcataaataacatccctccatcccctactttaaagatgggcagtcattagttctccgaactaattgcactaatgtaggcttttcccccgccgtttgccttcgttttcctttcctttcactgacttagagactgcaagtgaggaacttgataatagaagtttagaagagattttgaacagcattcctcctcccccgcctccagcaatgaccaatgaagctggagctcctcggcttatgataactcatattgtaaaccagaacttcaaatcctatgctggggagaaaattctgggacctttccataaggtatttgtatggaaataactattttataactttttaaataactattgtaaggtaatacgtttttacaagatgtttcagttttgtaactatcctaaaattcattcactccctatttatcctgatagtctttctgtctctctctctcacacacacacacacacgtttcatatgattttaacactgaaattatcttttgtttatctggttatctttggtacctctagttacaaagttttccattgaatggagtcggtgtgtgtttctgtttgaaagagtattttcccttggataatttttttttcttaaagccttctatggaacccttagataatttaactataaaatgagttttctaaaacgtctgcgttagaattggagcattcttattgaatgttgaagcttttaagagagaacttgatgtaagaaaactcaagtcgtatgcctgtgattagcaatgagaacttttaaatacttgcagtttttaactgcaagtaaaaaaatctaacagtttcagttaaaatcagtagtattagcatgaccttatgaacttttccgtgttttgtttttgtttttttaatgcagcgcttttcctgtattatcgggccaaatggcagtggcaaatccaatgttattgattctatgctttttgtgtttggctatcgagcacaaaaaataagatctaaaaaactctcagtattaatacataattctgatgaacacaaggacattcagagttgtacagtagaagttcattttcaaaagataattgataaggtaagggatttttactgttattggcaagttcaagtaaggaaaatggacttaaatgcattacatattttatttttggctttaagaaatttgtatgtaattacagcggaaagcattggtttcattatctctgaccgtattttattttgggggagtggtggtgcctgttaaaatacttattttttagctaaagaaatgaagtataaatagttcatagtaatcctttttggaataaaagcattgagcagttttagggtcctgagtactaaataggcattattttactataaatattcagttcatttttaaagttatattttgattgctttagaataaattagctaaacttgaaaatgtagcagttagccggttttaccatcttcattatttcagtgcattttaactctaatgttagtggcccctgagtatctgtgatatgaaagagctttgcttcagtttgactactgctgtaattaagtcctttagaaatgggggaaggacaagctaatgtttgttttctagaaatggagacaactagaggtaaaatgtctagattatttacctgttgagactttttctcttctgtttaataatgtaggaaattgattgttcaaaaatgactcgatggaacctaaaaatatagaaaactaattacataatgaaattgggaggtgatttgtcttttgaattcgttttcctttttttaatacaaagtgctttaattacacagaatcatctattttaatttggtttcttttgtgctttctattgtacaagttgggttggaaaatagattgccaggaaatcagattttattccattgcatattaattacatttgatttatctaaattttagaagcctttgcttcagtatgacagaacttttaaggttaagggaaagtgttaaagtagatttgcaattgatttttttaaaaatctgtttaaaagaaaatcaagggaatttagttgttatttctttgtgattctttttactttaaattaacggcacactctttaccctcccacacaaaaaaactaaagtgtatcacccggttactaccttccttcctttttctttgaatcatcattttaaaaagctgcagctttttaatctgtcaacatgttaataatttgtgtgggttttggatatggtgggaatcttgtctacgtcttctcaatcataaacgtttttaggcttgtttggaggtgggttttttcgttggctggttggtttggcttcttgatttttgtgatctttgagaaagggaccaaaacagcatggaaaagtatcaattctttgctaagttgggttattaatgagaactactggcagtttgtgtgcatgttcaattgaagtttttaatccatagaattagtttcagtatgaaatgagtgaattttgaagtaggcctatgacttaataccaacaattgttttctggttttgtttttcctcaaaacaggaaggggatgattatgaagtcattcctaacagtaatttctatgtatccagaacggcctgcagagataatacttctgtctatcacataagtggaaagaaaaagacatttaaggatgttggaaatcttcttcgaagccatggaattgacttggaccataatagatttttaattttacaggtaagtttattaaagacttcaaagattctcttattcttgttacttttttttctataaagctaggttggatgaatcctacatttttgaggccttaaagtactgtagcagcacatcatggtttacatgctacagtcaagatgcgaatcattatttgctgctctagaaatttaaggaaattcattcaaaactatgttttcatcatcagatgttcgttttatgtttggatgaactgacatacttgttccactctagcagcacgtaaatattggcgtagtgaaatatatattaaacaccaatattactgtgctgctttagtgtgacagggatacagcaactattttatcaattgtttgtatttccctttaaggtaacattttaaatgaaatgtattatattttaatctatccttttcctttgtttttgttcttattatctcttctgatatataaccaaaaaatgaaaaaatctgtacacttggtgtttgatttacctaagcacctagttaatttaatctttgtaacactttggatggttaacttaacctttactcaagttggtttttgttttgttgaaaatgacttacttggtggaaccactactactgaaagaacgaaactttgatattacattgttaagtatcagagctgttacagagcaagtccttttaaagagatgtaaaaattaagtacctgtgccaaactgatttttattagaaaccctgttttctttaagtaaaagtatattctaccagcatggcttggtaagaaaaatcccctatctttttttccctgtcctcaaaattcagaatttttcggaaaaaaaaaaaattagggtaaaaccatggctttgtcaagttcctgtttgattcgagggtatcttcttttcctgtgttctatccagaatcaccgaagcataataaaagcaaaactattttgtgatgcagaaatgactgaaataagtagggaattttgttagggtgactggatgttcctaataacaaacttataaaatgttagcctctgtttccattttagtctttattcttcaattgtttctaaaaattattacttttagacattcatagtatacaaggtaaatcagtatcattctaggataaccttttttaatatcttttgttaccaggcacagtatatttgcaatacttcaacctaaacttatttaaaaattaatgttgaggaaattaattgcagatatatttctaaacaagattggaatttatagaatgtggcattaaaggattttgtgtgtttttaaaatcaaattgaactgttttattgacttacatattctgggacttggtttggttaataatggataaaaagttatgtccctatataatactaaatttgatgatgataccaatttgcaggaaattgtacttatgtttatcttttgcttaatcttttaccgtcatcctgggataatcaaagttttacatttatccaaagattcatcaaaatacactgcattttaacccttctaaggataatttttttctctgtacagcatctctgtacgtaattcagtaataaaggaagctaatgtaatattgtcccaacgaagtaaataatttataaattgtcaaatttatattacatttgtgcttctgaagtatatgggatgctaaagccaatttgttcacatgataatctgaacctttttatgtgatctttacaattgtttaaaaaacatttcttcccaaataatacaaaggtgaatgttccaagttaacagattcagtttgactcaattaaatttatagataaggaccttaggaactcacttgttaggaataagaaacagggattggactacggtagaactaatagtgcccaattaaaactttgagggaaagtgacaatggtttctatggattgttttttttaagtcgcttatgaaaatctcagactcctaactggcaatttaaagcatttgatggtaagtaaaaatgtgatttttattaccttctctcctactgaataacatctatcttaaaaactgatttgggaggctgagaaattggaaacagcatcgtagtatcaacatccaagacctaaatcattacttggaataaaacatgtagactatttggccagtaatagtgattaacagcaaaagtaatctaaatttagtaaaaataaacatttatttttgagattaaaaagaaccaaattttttagaagttcctaagagtaaaatttttcagtgttaatatattcgcttagcaaatttttcaagtaggcatttttattacttaaatccattaaaaatttcattaattggccattcaattgaattcctattaaggcactatgctaaaatgctgtaagtaatattaagatggctaaaccttatttcttgtccttaaagacacatacatgccttcaaaaagtttgttgtgattgaccattgtgttttttataatcgtacattttcttttatatatacctactttgggagcctcggtcccgttgtaagtctgtacaagtagagttttattagctctgtataacatttcttgggtaactatgacttataaattaggggtgcttttgctccattcaggggtagaagaatggttaatgtttttactaaaaagttgtattaatgattgctgcctcaggaatatttttgtaaactcctcaaaagctacaactattagcacaactttaattttgtcaaagttttcaacttcatatgcttttgtcttcatattacaaaatctaaagtttgaaacacgaaccaggctgggtgcattagctcacgcctataatcccagcactttggaaggctgaggcaggcagatcacttgagcccaggagttggagaccagcctaggcaacatggtgaaactatgtctctatagaaaatacaaaaattagctgggcatggtgacacacccctatagtcccacctactcaggaggctgaggtgggaggactgcttaaacccaggaggcagaggttgcagtgagccaacatcgtaccactgcactccagcctgggtgacagaccttgtctctaaataaataaataatagccaagttcttttttttttttttaattattttgtaatttggagatttaattaacctaggtctgagttgttgcctagccatctgttcttttttccaatgtacttctcttaagcttgtcacataaactacttgggttctagtctcttagtctgtagaaatgagcctatgctataatatcaaaagaaatttttagttttttcagtaatgcctcagttttccaaaggtgtctgattcaatatccacaactagggtgaaggtggtggagagcagcaaggaagctacctctaaccaaccagaaatagatatcaagaagtccagctactaacaagttactctttctgttttattttagaaagatactaaccttggtggtttagttccttggcctctggtagcttacaaagatcaaattagagtaaaatgtattggaggaagataaagaacactaatttatagtatagtataataaaagatatagaaaataaaaagatgatcaagataaaaacttaaacctcagtaattttaggccatttaatttttatgcaaacactcatatttgctgtaagaatcactgaaaccctccttcatagtaattacaagtaaaaataaagagaagaataattgaggccttactaggacaacaaaactttgttatagctatgtactgtttgagttttctgtagttgatgcttgctaaaatttggattacatttgaataaggataaagggcatcatacctattcattcctcttagatttctaagctgtatttcagtaaattgattctcaaagagtggtataactggatcataatatccttgtttgccactcaagaaagtgttccataacttaagataacagtggtgggaaaaatcatttaagaccttgtttcatatgctttaagatacaagaaatagagataacactgggaacatatgaaactttgtcagcatcagataatagtgttgtagcgacttgaaacattttttgtctgtgattgtgccagtcactatttgtgacttggattgaaccttgatatgactttaaattcaggttgatgttttaaaattatttctgaaatatattgagcttattgccctaaattaaaactatattctgtaattttacatgagttatgtaagttttctgaagaaataaggaggaatcctttaggcacagactgtcaatctacagattacataggagatggcacaaatggaaaaagaaggaagaaaggaaatggtagcaagtggtagggcaggcaaaggacatcaaagaacagagcaacaagaaaagtcccaggttgtcattgtaataccacagtagtcttaatagtcaaaggacaagtaaaggcctgttaatagcctgttgattcaataatgctaatctgataatatggtaactggtttaaaaaaaagcaatacggtataataatcttaagactgctgtaatcccagcactttgggaggcccagacgggcggatcacgaggtcaggagatcgagaccatcctggctaacacggtgaaaccccgtctctactaaaaaatacaaaaattagccgggcatggtggcgcgtgcctgtagtcccagctacacaggaggctgaggcaggagaatggcgtgaacccgggaggcggagcttgcagtgagtcgagatcgcgccactgcactccagcctgggcgacagagcgaaactccgtctcaaaaaaaaaaaaaaaaaaaaaaaaaaagactgaatgttatacaggagttgagatgtaactattttgctttgtaaatatcctgcctttaaaaaaaaaaatgctcaactctattagaggaaatcatagctgtatctttcattttatttggagagagaggaacaaacaaccaaaaatgagcaaccattgttatttacccaaagctaagctgtttcttaatagctgtactctatctcttcagtaagtaatttgccaggagaaatacaatgtttttaaggaatatttttgtcagcgtaaactgttaaacactgaatcccaacttttagctatctgaaaaatgtatacttaaataatacattatggccatttgactcaaatgtaagttcttttgggatggtttttcattttcttaaaataagtgttcagatattctccttgaattgggtagaatattaattgtcagatattgttttttatttggatgataaacactaacccacaggatttaaactacaacttctagactaggcatggtgggtcatgcccttaatcccagcattttgggaggctgaggcaaaaggatcgcttgagcccaggagttcgagaccagcctgggcaacatagagggaccaccatgtgtacaaaaaaaatttttttttaaagattagctgggtgtggtggtgtgcatctgtagtcccggctacttgggacactgaggtgggcggatcgcttgagtctgaaaggtcaaggctgcagtgagctgagaccacaccactgtactccagcttaggtgacagaacaagaccctgtctcaaaaaaataataaatgagtgaacaaacaaactgcagcctctagatcagtagttctcagctgacagtaattctgccccttttcccataggacattcagtaacgtctgaagacagtttcggttgttatagctggtagaagtggggatgctactggtgtctagtgggtgaaggtcagaaatgctattaaagcatcttataatgcccagcatagctctccacaacaaagaatatccagcccaaaatgtcagtagtgccactgttgataaaccctacgtagatacaaacttgaataagactcttggcttcctcagtgacttaacgttcatcctgtgtaatccaaaggtttgggcatttttccaggcttcaatcctgtctaaaacttaaactcttgctgcaaacatttagagagaactaacagttgaaagcagaataaaatactttatataaatatctacatattttcacttatataccgattcatacataatataatgaatgttatggaaaataacttttggggtaacagttttactttgataatcattgtgcttatagactgtcagaagtatcgaaaagtgatttatgcaaataaaattatttcttaatgagtagattttcaaataagctgttttgtccactgttattgaattgtttactttttgtaattatgttgaggcttttggtgaattatgatgctctcattagtaagttttaccccacatttttaaggttcacctgtattcacttaggaaataggaatcactaagatatttgaattaagaaaacaatatactatttttaatgtgtaattctttttgttgacttttttcgtctttgctattttgttgaaaataagaggtatatcttttttcatttgcctgtacctattcttccattgtaatagtctagagtacaaacaagctactcctataacgtagcagcatttggcctgaacatactcagacacaattttctctccaccatcaaactaaatgactgcctagcagtcagccttgatggttacttattatggattttttttctctttactcttcataattaaactgcataaatgcaaatatgtaaagttaatctaagattttaattacagttcaaagttgttatattagtgattacaaactgaaagttttctgatgtcttatgtaccagtgccattagttttctctagtcaaggtggtctgtttgatttctgttattaccatgagaaataggtaatatccttttctgtcaaaggctcttgtttttagaaaactgaacatgtaagtttttgactacctttgaaacccattacttgttaaggaactcctaaaaaccatgtttgtagagaaagttggtaatactactttgggacagggttcctaacacagtttaaccatgcaagtgtttttgaaaattctttgttttagaacaggagcttcaattgtgttattaacaattgataatgtttccactataatcagattgcagattaagtgaaagctttcctaaattttacttaaagaaacaagttttatttatttatattgaacattctagttggggaaatgagtgtgtgtaagtgggtgtatattacacttttataaggatttatctaagggaatataaattcatgtttcatatctccctgtgtaaaattaaaactcttaggaataccagtgaaaataacatttttatttataccttattaaatcattgcactactaactgtacattatttagatgtttattactcttggctttattatttaactgctcccaattctcacttaagattgatttagctaaacatacacagtgagtatgaaatataacttttttttaaagggtgaagttgaacaaattgctatgatgaaaccaaaaggccagactgaacacgatgagggtatgcttgaatatttagaagatataattggttgtggacggctaaatgaacctattaaagtcttgtgtcggagagttgaaatattaaatgaacacagaggagagaaggtgaatcatctgtagactttcattgtaaatcagaatgtttcatttatgatctaacaaattttagtaagtcagatattcatgttataatacttaatgaagaagtgttatattgaaatttatatcttaacatttaagatgaacattctccttattaactgtttttatctaatgtttgcatattttaagttcatattgtacatatgaagtgtgtattcagtctttaaacttttaatttctgtagttaaacagggtaaagatggtggaaaaggaaaaggatgccttagaaggagagaaaaacatagctatcgaatttcttaccttggaaaatgaaatatttagaaaaaagaatcatgtttgtcaatattatatgtaagtgccttgattgatattaccaatttttatattagtttttaaccattaagtcaaagcccttctcttttcctagagaaacatgaagactgaagtgaaaaaaaatctctaaatattgttttgtgtgactgaatgtgttagctcatgcctgtaattccagcactttgggaggctaaggcaggaggatcacttgaggctgggagttcaagaccagcctgggcaacatagcaagaccccatctctacaaaaaaaggaattatgtggtgaacttatccaatgtgaggactatctggctgtgacacctgtcatcccgttgatcaccagggttgaatttattaaattaggcatattaattcattgaagttgactttttagtatcctgctttaagttgggaggtaggttcacaggtatttattactgtactcagtccttttacgtgtgcactttttaaaattcgtgtaatagcagatctgatttttttcagcttatgatgaactgttttttgagatgggctgtttcacccagggtggagtgcagtgtgtgatcacggctcactgcaatctcaaccttccggactcagttgatcctcccacctccacttcatgagtagctgggactacagggcacacaccaacacacctggctaattattattattattattgttgctgggatttttttgtttttattttttcttttttctttttttggtagagatggggtttcgccatgttgcccaagctggtctcaaacttctgagttcaggcagtctgcctgcctcagcctcctaaagtgctgggattacaggcgtcggccaccacattggtacaatgaaatcgatttttgttcctaaattctagccttgacccagggggattttcccctcatagcctaggcagtcatatattgactagttaataatattttagaaacagttagttttactaaaattgttatacagttttggaaatggcattttaggagcttcaatttctttttttttttttcctccctatagttatgagttgcagaaacgaattgctgaaatggaaactcaaaaggaaaaaattcatgaagataccaaagaaattaatgagaagagcaatatactatcaaatgaaatgaaagctaagaataaagatgtaaaagatacagaaaagtaataatattttgggaagtactaaaagtatttagataattgtattacatgtgtatttatatataaagttacttctagcacattgtgagtgtaagacatttgccagcatatcaagtggtggcccccttagtgaaaaaaaaaaacttgccttgcatccagttccttgttacagatgaaattccctactctgaagtcttagaaccgtggggatgctaccccctagtggcgtagcacagtaacaaacaataagcatttggcttcacagtttaatcttttagtagtccacaaatctgatagagggataggatttgggtttttctagatagatttttaagggttttatcatgtccctacttgatgccatttttcaatgacactagtatctctaattatttttaaataaaaaaatttgtatagtaagtttattgtatagtaacttgtaagtatattcgtaaaaggtaaaaccaaaattttactcctatggtaaaatttttatatacctagacattgtagtcactggaaaatgtgttattttccctccaacttagaaaggcaaaatagctgtcataatcaaaaatacaggtgcttcttcaactatggggagagggatcatcttggaataaggagagttttaggatcctgccttattaagagcctggacatatttatagaggaagtgttccaggtaggaaatgtggttttaaaatatgtgcacattcaaaataatgacttacaatatacttgctttgctaggaaactgaataaaattacaaaatttattgaggagaataaagaaaaatttacacagctagatttggaagatgttcaagttagagaaaagttaaaacatgccacgagtaaagccaaaaaactggagaaacaacttcaaaaagataaagaaaaggtaggtgttagaaaaaaattcttaaaatttcacgtctgaatatcatacctagttttcatggatgtgtttgccccttattgcctaagagaatgaattagtattctaaatgttgttttaaggtttgtctctgaacatgattttaccccctcaagggaaaccttgcttctactgactttattttgcaggaggttttttgtttggttttggaattttgcagagatggggtctcagtctgttgtccaggctagcgtgcagtggtatgattatagtcttgaactcctgggcttaagaaacctacctcagcctcccaaagtaacgtggactacaggtgtgagccattgctcctagcttgactttgagttttaaagtttatattacaataatatgttattgggaaaacatttaccaaatcaggagttccattttggtgttaattttaattttctttttcctaaagtagtagtttttaaagatatttaagttaggtattacagacttaaaaatattgcctgtcttctacaaaaactaagctaacaggatcagagcaggatttcccaagaattaccaatgttggccaggcacaatggcttacacctgtattcccagtgctttgggcggccaaagttggagaattgcttgatgccaggagtttaagaccagcctgggcaacatagtaagatcccatctctacagaaaatccaaaattagccaggctcagtggaacttgcctaaaagtcctagctagtcaggagagtgaggcggcaggatgccttgagttcaagattccagtgaatagtgatcaagccactgcatccagcctgggtgacaaagtgagactctgtgtcttaaagagagataggaaagctcataatttggaatctcttaagctgtgttcatgttcatagctctgtcatatttaaacagatatgataccttaaccccagccccgcaaaaaaaaagctttgttccatatggttacacaataattatagattaggctctactttacgctataagcattttctaaatgtatttgttcacaaaatactttctgcttagcacagctgataaatacgttgagtcagtgtttaaggaagtggcattttgggaaatgttgaacttcacaggtactagataatcagagtaaacaaaataacaaggctttgggggtaaccccaaagacttgacagacttagctaagtgtaactgttacagagtgattagcctttaggcatagactgcatggataagtgattattatcagaagatgttaatggagtaaaatattagccctacatgatgactctggaagagtaaagttgtgaaagattttagggttggggagatggtaaagataatttgtggtaagttatgatataccaggaaggatagtttagaaaattccgtgtagtcagagcatatttatagctaaagaagaataattacaacctgaaatcaggagagaaggatgacagacctgaggccctgccagagacagttttccttcataagaggtcaggtgtttgtagaagtagttttactattagattgagagaatatagaaattacagtgaatagtcgggaaaatacttgttaaagctagctaatttaactctgattataaagaaaagaagaactagaggaccctgagaaatgcctttaaatatgtcaaatattgatagtattgggtaacataaagatgtatgctcctataacttgttttataatctcaggttgaagaatttaaaagtatacctgccaagagtaacaatatcattaatgaaacaacaaccagaaacaatgccctcgagaaggaaaaagagaaagaagaaaaaaaattaaaggaagttatggatagccttaaacaggaaacacaagggcttcagaaagaaaaagaagtaagttttttttttttatcagtgtttattttggtggcttttttttttttaacttaaagattattttttcaaaaatactgaaacctgaactggtaagtttggacttttaatgtccaacattcctaaaactagtcaacctagacttagatgactattcttttaattcctgctgacatgttttttaaaaagtttactaaatgagagtttgtagtagtagcagaaggtgtgatgtcaaatacagtaccttgattattatatatgccactcctaagcgtgttgaatcatcatattttgttgccacctgtaaaacctggagccacactaagcgcaggttaatgtctcttttgtttttgcttctatagctcttgtgtaatagttaaaagctgtggctcttgtttcagttcttggttcaaatcctaggtcaatcacttactgtctctgttcttgtgccggttgtcatatctccaagtcatcttccttaaaatgagaaagaatatatctactttgtgaaaataaagaataaatatatctatataacgtactgagaaagaaaataaatgttagctataattttagcattatattaataaaacgagagcatgaagttgtcacattgatatgtattatctaccccaacaagagtaagcataaaattatctttgtttgtatgtaccacagcatttttgacagtgctaagcatgttaaatacctatgttaatggataatggtaattgactgcattaaaaagtcatggtagagtctgctttggcatatcaacatgttctaatgtcaaactataaaacttaacaggttagaatacctgtgtgatgaagtgtcacttaatagagtctgctttggaatatggacatgttctaatgtcagattataaaactttacaggttagaatacctgtgtgataaagtgtcaatggataatgcagtagctttcatgatgggatacttcatagttagtggattttcactgtttgcttatttaatatatattgagtactcatgtgccctgcaccccatgttaatgacaaagctaggcctcaaatgtctttattcctcagcgtaatgatcgatctcacaaagctcttgtgaaatcagttgggaaaagactatgtacagtgaatattgacaactaggcaaaaactgaatctagtccacttgtgagaatttcttatttctatatactgtgcttatagaatctcctttcttaaatcgaatataaaatgtatggtttcatttcagtgtaggtttgaaagtaaatatctgtccagatttaatgaactcatattttaacagagtcgagagaaagaacttatgggtttcagcaaatcggtaaatgaagcacgttcaaagatggatgtagcccagtcagaacttgatatctatctcagtcgtcataatactgcagtgtctcaattaactaaggctaaggaagctctaattgcagcttctgagactctcaaagaaaggaaagctgcaatcagagatatagaaggaaaactccctcaaactgaacaagaattaaaggaggtaaatctttgcttctctgttgcatcagaacatcattcgtccacttcagctttatacatttttgtttttaatctccgcgtcagaggtgactagtgataaattttcttcattttgtataatctcaaaagaatgaggtcagcatttcagtattccatatgtgaactgagactatcaagaaactatattatccccagaagcaccatatagtaagtaaatcaccaccaccaccccactgtagaaataatttaaacaaaagaaagtttgtgtttctttaaatcttaagtatagacaatttaaagataaataaaaaacaagtgtatatgtatttatataatgaatatacaaacaactatcttaatgtgttttgggttttgaatttatggatgtagtttctttgcttgcattccaaaatgttataaactaactaagatgtatagcttatcggtgcctgtcccccatccttgagtgaattagatgtctaaggaatttcgtaaactttaatctccaaagatctccaaaacctcagtaggcaaggtggcaataaaaaaaaaatctgtttgaagtgtaattatactgaaaataaatatgagtctttttcattttagttaatgcatgctatttggtcatcagggaatttcatgaccaggtagaatttaaatgtaaattaagttagatccagtgactgcttctgtcttcctgggattcggtttcttttgggatgaattatgtcagtaacttggtttaaactttatgccagtacagtaagtaatagacataatttaaatctagtggatggaggaatataccagttagaaaagatggctgctgagaagttggagattgagaaacagaggttgtgtttatgtgtgcatgtttgtggttcctttcttgttgggagcctggcatttttgtatagcaataggactatccagtcatctttcgtttcagaggtgtgctttttctccagtaccccccagccccgttcagctaaaataaagcacagcataaccgtagtcctgcccagtcattttctgggtcagcttttcattagggcagagctgaagaattagggcacacttatgtataactatgtagtatcaaactgggatttccacagccccagctatacttctctatcaggatgaactgtttgctcctgaaaaaaatattacacctaatgttttcttttattgacccaagtaatttatgccccttttaaacccatccatattttccacaaccaaaccagcaattgccatacaggtgctcagttttggttcaaatttttattgttggtctttctttctttattgttattaaagcattacaactaattcagtgctatgactggtcatatttagaagttaatgcttctggatttcattttattttcacttttagaaagaaaaagaacttcaaaaacttacacaagaagaaacaaactttaaaagtttggttcatgatctctttcaaaaagttgaagaagcaaagagctcattagcaatgaatcgaagtagggggaaagtccttgatgcaataattcaagaaaaaaaatctggcaggattccaggaatatatggaagattggtaaagtagatttttggggggcatggctttactttttttttttaagaaagtgtaacttatttttttgccttgacaaccatatttcaagtgtcactgtatataaaataagattcattttgtttgttttaaggcacatttatttttaaacattttgcccttacagtttcttgtttacttagctttagataaatacaattatttcatacatatcaagaaaaatactagtaatgtcacacaaacttaaaaccattttatccttttttttaaaagagagactttagccaggcacaatggtgtgtgcctgtagtcccagctgttggagaggcagaggcagaaggatcacttgagcctaggagttcaagtccatcctgggcaatatagcaagactgttttttaaaaaatgaaaattaaaaaaaatttttttatatatttggggtttcacaccattttacttaggtttgggctagcatttaaggatataacaagggataatctaaaaatccaaggctagcaatagtgaggaccattactgcttcttagcttcgagggaagggagttgtggtccagaggagatggggaaaatggataccttaaccccacctatttcctgccctccagtcttagctgaaacctcaaattggctgaaggtggagagtcaaaggagccagttgatgcagtccttaagtcagcctttcggagaagggaacaaattgatgtaaaaattacccaacatgattgcttctgcatcttgtatcgggacttccaccttattttcttaaagataaacagtttgatcctattcatttgctctcaaagaaagcccaaaccagtgaatactgctagatagttgtgtaatagataaacagataaatgtgtttcatcaggatttacataattttagatgcttttcaataattcaaagttttctgagttttgcttatagttcatttaggttttaagcttcatgttgttttcataaaatgaaaacagttctttcattttgtgctcattagaaattcaagctgcatattcataaacttatacatattttgtattttgttgtgtacccttttgttctctttaaaaccatgtctacataaagtttttcaattaaaagaagtttttaaaacttgatgaatgaaatggtcctgtgcttttctgcctaactcttttttcaccccactcttcattattagggggacttaggagccattgatgaaaaatacgacgtggctatatcatcctgttgtcatgcactggactacattgttgttgattctattgatatagcccaagaatgtgtaaacttccttaaaagacaaaatattggagttgcaacctttataggtttagataaggtgggtattcgtaataacctacctataattggaattttttttttttgagacgtagtctcgctctgtcacccaggctggagtgcagtggcatgatcttggctcactgcaagctccgcctcccgggttcacaccattctcctgcctcagcctcccgagtatctggtactacaggtgcccgccaccacacccagctaatttttttgtattttcagtagagaggggtttcactgtgttagccaggatggtctggatctcctgaccttgtgatccgcccacctcggcctcccagagtgctgggattacaggcgtgagccaccacacccagccctataattgaatttttaagtgctaagtgtgtttttctttttggattcaggctttttcttaatggttactcagtgaacacctgatgggttttgacgattattttatgttctggggttatatgattataaaaaattgtttgacatttgcagtgcctccactaaaggaatgtacattccagagttaaaaggaaaacctttattgagataatttacctacaataaaatttatcattttaggccaggtgcggtggctcatgcctgtaatcccagcactttgggaggccaaggcgggcggatcacgaggtcaggagtttgagaccagcctggccaacatggcgaaatcccatctctactaaaaatacaaaaattagctaggcatggtagcaggcgcctgtaatctcagctactcgggaggctgaagcaggagaattgcctaaacctgggaggtggaggttgcagtgaacctagattgcgccactgcactccagtctgggtgacagagtgagactcaaaaacaacaaacaaaacaatcattttaaagtatgtaatttggtgggtattagtatattcacagtgttgttcacccatgaccactatctaattccaagatatttttatcactcccagaaagaaaccccatagacagtaacagtcgctccctataccccttcaccccctccgtaacactaactacttttttgtttctgtagatttatctacatataaatggaatcatacaatatatggcctttttatacagctacatttacttagcaggttttcaggttcatctatgttgtagcatgtatcagtacttcattcccttttattgccaaatggtattctgttacatcattttgtataaccatttgtcagttgatggacatttgtgttttcactttttgtgctttggcaatacttgtgctacgaacatttgtgtacaagtttttgagtgaacatgtattttcagttctcttgggtatatatatacctagggtagaactgctgggtcatgtggtaattctatgtttaactttttgaagaactgtcaagattgtttccacagtggctgtaccatttcccacaagcatgtgtaagggttccagtttctttacatcctcgttaacacttgttatggtacatctttttgattatagtcatcttagtgaatatgaagtggtatctcatggttttgattaggattttcctggtgatttatgatagtaaaagtcctttcatgtccttggccatttgttatcttccttggagaaatgtctgtttcaaatcctttgcccattttttaattggtttctctttgttgagttgtaggatttctctattctgaatacaagtctcttgtgagatatgatttacagatattttaccccattccttggattgtattttcactttcttgatggtatcctttgaggcacaatttatcttttttttcctttggttgcttgtgttttgggtatcatacccaagaaaccactgcctaatccaaggtcacagtgatttgcctcctttgttttcttctaaaagttctatagttttggctttatatttaggttttaatctattttgagttaattttatcacgtgatataaagtagggctcaaactactctttccatgtggctatccagttattccaacaccatttgttgaaaagattctttaccccattgaattttcttggcatccttgttgaaaccacccaaccattaatgtaaaggtttatttctgggctttcagttttattacttgtgctggtataggacactgtcttgattattgcagcattgtaataagttttaaaatcaggaagtctgagtcctctaattttgttctttatcatattgactgttctgggtccctataatttgtatatatgacttttaagatccagatggtcaattactgccacaaaaaaaggcgaggaagtaactgggattttgatacaggttgtattgaatttgtagatcagtttagatagtataggcatcttaacggtattaaatctttagaaccacaaacatgagatgtcttccgtttaggtctaattttagaaccttttgtgtataattcttgtttcttttgttgaatttattcctatgggtttttttttgtttttttttttgagttttcttttttgttaactgttgtttttgtttgtttgtttgtttacttttagatggctgtatgggcgaaaaagatgaccgaaattcaaactcctgaaaatactcctcgtttatttgatttagtaaaagtaaaagatgagaaaattcgccaagctttttattttgctttacgagataccttagtagctgacaacttggatcaagccacaagagtagcatatcaaaaagatagaagatggagagtggtaactttacagggacaaatcatagaacagtcaggtaatagtgtttttgtttcttggtttgtttttttttccccccacagcattgactttatttaatcttgttggggagacatctgaagctgacttctctcccctgttttccaggtacaatgactggtggtggaagcaaagtaatgaaaggaagaatgggttcctcacttgttattgaaatctctgaagaagaggtcagcatatctaaaattgtatccagacttttttttttttttaaatagctttaccgaggtatatacttactacaaaatttggccattttaagtatggtgtactcaaattttaatagatggcgttttctataaatgactagggattttttatgtaaagccctttaaagttttagaaaacaaaatattaatcagaaactatatgctcaaagtacactttttaattagtacatttggatcatacagatattccataacttacataattatttctgttttacatttaatttattggggttttttttgtattattgctgtattacataattttttacttcaaaataattctttaaaagtatagcaaagacttgatgcaaatctcaacttcagagtattttaaacttttttcctcctcaaaaacatgttctgaaatagcttgaacaccttttcccaaagtgttgtgctttgatttttttccctcccgtattttgaaaatacaagtttatgtccttctgcttaagtatttgaatgctgtaccttcattgaaataataggtgactgtacaacacttagttacctttccatctgattttctgatcaagaaattacttgaccatctcctgaactttaagattgggattggaacaggtggtttgattttgttctggtctttaagatcagaagttttaggctgggcgcggtggctcacacctgtaatcccagcactttgggagtctgaggctgtcagatcacaaggtcaggagttcaagaccagcctggccaacatagggaaaccacgtctctactaaaaacacaaaaattagccgggcgtggtggcacgcacctgtaacagtcccagctactcaggaggctgaggcaggagaatcgcttgaacccgggaggcggaggttgcagtgagctgagaccgcgccattgcactccagcctgggcgacagaagttttagttttcttcgtaagttgacttttctgtcaatctgaaatggctcttagagaaaactttctttgtaggtaaacaaaatggaatcacagttgcaaaacgactctaaaaaagcaatgcaaatccaagaacagaaagtacaacttgaagaaagagtagttaagttacggcatagtgaacgagaaatgaggaacacactagaaaaatttactgcaagcatccaggtatgtgtgtgtgtgtgtgtgtgtgtgtgtgtgtactgaaactattgggattcaactggaatttatcagaaccattttgctatttgcttacaatttattaaatatataagggagggaggatctataggcagatataactcttgatgattttgtttcactgagtactaatagataacgccctgtcacagtgttgttccaaccacagctattcctgttttccgtttgtactccatagaaacattactttccttaacaactatatgaccctttatttttattctcttttcaaagtggaattttttttaattatgaaaaagcaatgcacgcccactgtttttttaataagtttccagaaaatacccaaatgatcaccttcattttgacgtatgttctttcaacttttctaatacctagtttgcatgtaatgtatttatatatgtggtagatatgtgtagatatataaagtgtgcatatggtttttttaatgtcatactagcttttcttaaattatggttttctttccaaggcagtataaatgtactttgtttttaattgctttagagcattttgtttataacataatttgacaaattttttttgtattatgtacatggctatgtttaaaaaaatccttgtaggtataccttgattcagttatttccttagatttcaaaaattacaagtattacaccatatgtgtacaatgtttaaggcatttgttgcataatgccagattgttttcaaaagttataattcatgcactactaacagcatattcaaataattatttttccaagtctttgaacactagggtggtctacataagtttgctaccttgtaaacagaaatgtggcattttaacgtgtctttataatgagcttacatattttgtgtttgttggccattttcattttttatatcaatggcacatatctttcctcttcctattagtgtgtgtctttttcttgaagattttaagtgccctttttaaaaattcacaatgtttaaagcaaatgttaaaatattgaccttaaatgttaaaacttttttgtagcgtttaatagagcaagaagaatatttgaatgtccaagttaaggaacttgaagctaatgtacttgctacagcccctgacaaaaaaaagcagaaattgctagaagaaaacgttagtgctttcaaaacaggtatgtttagagatagaccttttttggggggaaaaaaaaaacaggtttttaaagcttgcaatatttaagaagcagtagaataataatagaagctaagtatatgcaagtcattgcactattttatggtgtttgttataaagtaagtgttattaatagtctcatttgacaaataaggaaactgaggcatttgcctaaggtcacacagcacgtggtggtataggaataggtgatttttgagtccatgcttttaatgtcatactttgtatactttggccctaatctttccaaaaccccttcaagatagtggttatagatttagaaaaattatatcactcagataacacagggaataagtggtatgcaatcaaagaaaaacaatgtgtacttgaaaacttaaaatatatatatatgtattttttttctttcataacttcttcttgtgcagttatagacatgtaaatgttctaccaaaatagaatctttaggcaggaaaaggaattcacaggcagaattggctctgtagccttaattgaaatcccctgatcatgcacttgagcagctgtgcttgtctttccatgttggcttcaatcaaacatagatgtgcatcttaatgggagaagggatagtggattatgccacagtccccttccaggtttacagaatcttagctagtgactccagcaaacacagcaaggttcattttattcttaagacagatccctgttacagtttgctttgtgagccaaggaagacaaatactgattaaccatcccaaagaactaatgagagtggagttggagcgattatccaactgctccaaaaatgtggggattttcttccaaaagaaaaagatttttaaatgttgacacatttccacaatgcatatcaaatgtgcatttatattaatttgtgtctgtgtttatctgcatttctaatattcaggcactcaaatagtatctgctactggccaggctttgttttaggtcctactgatagagcagtaaacaaaaataaagtctcttcccagggagcacacatgtaagatggcacatatttgagtggaggcccaaagaaagtatgagtgctaacccatgtatgtttgagaaaaaagcattccaagaagagtataaaggagcaaatacaaaggctgaagcaggagtatgctgggaacacaaaccattgtggctggaataaaggacggaagaacccagattctctgaggccttcacccacactcccctttccctgcaagcacccacaacaatggctttgatggtacctgatggtcaattgagaagccaaaatgtatatctgtgctattaatggcaacattttcatggagagactgcaagagtctatatgtgtttcatccttatttgaaaaggaatccttgactttgttaggagctctatatatctcctctcatagaaatgccatatattatcaggagactgttaatatctcatgtggaggacccatttgtgcaagcatatctttaaaattaaatattttcaactattgaacatattcatatttttaaataaaggctacagtaaaccattatatcgaaatctgtgcaaacattttatatttaagataaattgggctgcgcatggtggctcacacctgtaatcccagcacttgggaaggccaaggcaggcagatcacttgagatcaggagtttgagaccagcctggccaacatggtgaaaccccatctctttgaaaaatacacacgcacgcacacacacaaacacacacacacgccgggtgtggtggcacatgcttataatcccagctacatggtaagctgaaccacgagaatggcttgaacctgggaggtggatggaggttgcagtgagctgcgatggcgccactgcactccatcctgggccatagagctggagaacctctaacttcgttacagaaaatccagacttctgtgtgactgcttgccagaagaaacatgtccaatttgtttatgccttccaaattatgcaagtacttttgattgaattgacctaaattatgtctaaaccctagccacagaggaatctgggaaatgttaacttttactcttcgttgtcacaggaaggaacgctaattcatcttatatcctccactttgttttaatgtggagaactgcgaagttatgttagcagaagaaaataaccacaatttcttcattgtgggcaagttaatattgagttaggcacatagtgtatctaaggctaaaaatcattatgaactcagtagtcaaggaagtgccctaagaaaaagttgtaaagatattttaaaagaagctgagaacatgaagccattaagaaatggtgtgtttacagccgagctagtgtgtttaactttgtgcattgttgtaacaccatttgttttgatacaggatatcgtttttttttttaaggtgctttttcccatatgcctaaaatttgttttaatgcatcacgtcaagtcatagcaactgaagaaatgtacatctaacaaatgatgttcattagcataaaaacacaaattaggttctttattttttaatttcagaatatgatgctgtggctgagaaagctggtaaagtagaagctgaggttaaacgcttacacaataccatcgtagaaatcaataatcataaactcaaggcccaacaagacaaacttgataaaataaataagcaattagatgaatgtgcttctgctattactaaagcccaagtagcaatcaagactgctgacaggtagagtatgcatgttaccctaacttgttttccctttccctgccttcacattggaaagggggttactatgtaatgttccataaaatgtttctcttactgttaatttattgaacctgtctgacacattacctaatgggacttccatgacggaaaacctataatgaacatttatcctatggccaattaaaaaggctggtaaacaggtatgccataggaaagtacaggtagactgtaactccccagttgctgtgagggcatagaaatcagttttgtttctctggtctcggggagggagtagttggtccttaatttaaatagatacaggccttaaaagaataagtaaaagaggtaaaaatgggatcacttagcaaaattaattctcttggtaacttacattttagtttttatttttattttttgatacagagtcttgctgtgttgcccaggttggagtgcagtggcacagtcagggctcactgcagcctcaatctcccaggctcaggcagtcctcccacctcaacctcccaagtagctgggactacaggaatgcactacaacacctggctaatttttgtattttttttgtagagaccagagttttgccatgtttcccaggcaggtcttgaactcctgggctgaagcagtcctcttgccttggcctcccaaaagactgagattacaggcatgagccactgcacccagccaccttaaaattttaaatacctagaagatttcattgtccttaaaaaaaaagatttatctacttaggtttttttttttttttttttctttttgagacagtctcgctctgccatccaggctggagtacagtggcgcgatctcggctcactgcagcctccgcctcccaggttcaagtgattctcctgtctcagcctcccaagtagctgggattacaggcacacgctaccaggccctgctaatttttgtatttttagtagagacagggtttcaccatgttggtcaggctggtcttgaactcctgacgtcatggtccccctgcctcagcctcccaaagtgctgggattacaggcatgagccaccgcacccggccttaatttttttagagtatttattgaagtgtgtctgaaataaagttaggtatgtatataaaatattgaaatttaaatagccatttctttttttagaaaaaattttaacaaattgattgcatattgattatctggttaaattaatccagagtgttttgctcagagataaggaggtaataagggagaagtagtgtcttgcttttttggaagtacttgttgccttgtcttgaattgggaagtatttgaaggtacaactttatgggtgtagagatttaacaatctctgacgagaaaatgacaaaagaatttgataatctaatggacagtgttgcatcagtctaaagttgaatgatacaagcagcttatataagaaaggcatttataattaaaaatatacaactcatcccataagtgtttgtataaacctacaaaaactgatttaaggatggtttagtaaatcataaacttaaaaatatatgaatagaaaaaatgtcacattaaatttcatgaaaagttctttagtaggttttcagaaacaataacaaatcaccttaccacatttttgatgcatcattttgcttctttagaaaccttcaaaaggcacaagactctgtcttgcgtacagagaaagaaataaaagatactgagaaagaggtggatgacctaacagcagagctgaaaagtcttgaggacaaagcagcagaggtcgtaaagaatacaaatgctgcagaggtatgagttgctttgtattgaagaggagatgggatgatactggaaccaatttaaagagctggatatatgacagtgcctagaatgtagtaagcactcatagacttaaagttttataactatcaatttttatttgtacaataagaatactataatttgtgaatttaaatgcttaaattattttaaaatggaaggggcatgaggagagattggtaattccttcatctctgtaatgtgaaaatgatggctctatttggaaaattctatctagcagttcttttcggtgtttaggaatccttaccagagatccagaaagaacatcgcaatctgcttcaagaattaaaagttattcaagaaaatgaacatgctcttcaaaaagatgcacttagtattaagttgaaacttgaacaaatagatggtcacattgctgaacataattctaaaataaaatattggcacaaagaggtgagattgttaccgtttagtttaattttaaacatattctttatgaaaaaggagggtttggggaggattgttttagggggttggggttcttaaattttgtttgtgagctacattgtgatttttaattctgtgatcacttctaaggtttataggggacataacaatataaattgttatatacagaaaagtctgagtaacgattagaattagacaactaccctttcaccctagggctgatctggacatttaagaaaagattacatggacacttttgagtgttacaactatttttcttgaagtcctttgaaaaataattgataaatcagtcacaactcctgttgttttcatagctgtgtaatttgtcatatttttttttaaacaatgaattgtatgtaatattatgccttctctaactctcccctaaattgaacttttagatttcaaaaatatcactgcatcctatagaagataatcctattgaagagatttcggttctaagcccagaggatcttgaagcgatcaagaatccagattctataacaaatcaaattgcacttttggaagcccggtgtcatgaaatgaaaccaaacctcggtgccatcgcagagtataaaaagaaggtatgaatgaactgtgtatgtatactagttggagttctttttagtccttagcctaaattctgatctttagttttgtataattaacaatgctgttggccgggcgtggtggctcacgcctgtaatcccagcactttgggaggccaaaggcgggtggatcacaaggtcaggagttcgagaccagctgggccaacatagtgaaacctcatctctattaaagatacaaaaaattagccaggcgttgtggcacgtgcctgtaatcccgggtactcgggaggctgaggcaggagaatcgcttgaacctgggaggtggaggttgccgtgagccgagatcgcgccattgcactccagcctgggcgtcagggcaagactacgtctcaaaacaaagtaataattaacaatgctaattatcatatcaaatttatctgaatagattttccctatcataatcttttcacaggaagaattgtatttgcaacgggtagcagaattggacaaaattacttatgaaagagacagttttagacaggcatatgaagatcttcggaaacaaaggcttaatgaatttatggcaggtttttatataataacaaataaattaaaggaaaattaccaaatgcttactttgggaggggacgccgaactcgagcttgtagacagcttggatcctttctctgaaggaatcatgttcaggtgtgtaattatgctgagtttataatcccactgttacctttttctacatattctccaaactcagtatttcttggaggtaggatgtgaaggcaagatgtacaacttgtttcatttactagtaaatactaatttgcttgcatgctatttatgcttgcagtttacaggggcagacagccagtatttacaaaatatttgtctagttcatcttttcttaaattttcaaggcatttttaacatgaggattgagaaattgtatttgataaggagaaagaatagcaagaagtataatacttagcttgctctttaaatcttaaaactttggtatgtgctcctatgtatgcatcctccaataacgtttttataaaataacagaaaagagaattcatatttgtgaaaagcaagttacagattcctaaaaaagatagtagaactcaattatggaaagcaaatcacaaagtcttaactttagctttacaggtaatttgactatgattttcttaatcatttcagtgttcgaccacctaagaaaagttggaaaaagatcttcaacctttcgggaggagagaaaacacttagttcattggctttagtatttgctcttcaccactacaagcccactcccctttacttcatggatgagattgatgcagcccttgattttaaaaatgtgtccattgttgcattttatatatatgtaagtaatcattttgggattttcattccagaaacttttaggggtatcctaaacattacacatggaattctttatttcttacaattgagctttttctttattgtctaataactccatctccatctcctctggtatcagtggagaccaaattattttttatttgaaccaaatatttccattttggaggagtaaaatataaattaaaaatgcaaattagtagcagaatcacagctagaatcctaggtcatcttcctagatcttttccactagaagtcaaaataaccaaattcctttcacactcaaatactgttttatgaattattcctgccatcattcctttacatgttatcaatgtaatgtttattgtccaaaaaatatttgaggttacatgtttgtgtgatttacctgttattacttaatgtttgacttttctttgtttctctttaggaacaaacaaaaaatgcacagttcataataatttctcttcgaaataatatgtttgagatttcggatagacttattggaatttacaagacatacaacataacaaaaagtgttgctgtaaatccaaaagaaattgcatctaagggactttgttgaactttatgctgaagattcttcaagttgattcagtgtattactgatttttttctatttgtaaaggattatgagttgtataaaatacatactccctaaactagatcatgaaactggtttctgttttatgcagttgtcatttgtaaagtctaataaaatattctctataattgcttctagattacaaaaatatgacaatcttgtaagtagcagactatggagaaaaatgagttacctggagggtcaggtaacttgccaaactaaaaagtatgttagttgaggcaaagtcctaagcaaggttgtgctatcaaggctcagcataccttcgtgggcctttgatttaccaacactggaaatgcctgccaactaatcttggatagattctttaaggcattccacttagcttgccagttgagacaatcaccacagttattacccaaatactatgaacatatttttgtaaaccagtcattctgaattatagtgatgagaatttaaatatatgcttttctagaatttgatgtttgaccatttatgacttaattaccagagagccagtaaattaggacagtgtttcaacaagcctaggctatctcgtaagttgaaaaatatcccactatagttgcttcatgagtatgaagtaagatggcctctgatttacactggttcaatttacaaattttcaactttatgataggtttatccgggtactaaatgcatttcaacttgatagtttcaacttatgataggtttaccaggatgtagtcccactgttgaggagcatctatttaggggttaattactttagtaataagtggaaagtaagataccttgagtaatgtttgcctataaaattgtcagcgtatttttacactattggctcaagaatgttataatgctaagggacataagttggcaaccacttggtttttggaaggactttcggtattgtattagaagtctgccctagctgttaaatttctgggtatttatcctaaggaattaattaaagagttaattgttcctttcttcagtgggccattgttttagatatttaaaaaatccaacagtttctatcataatgtaactgtaaaaatgtaaacacattattagcatggacttttaaataaagatttaaagaaagcaagatcggaaattcaagtacggtaatttgttctaaatcaagaatatataagggaaaagtaagtttaaagtgctataatgataatcaagtgttttcatttggtgcgaaaatagaatttaatacttttattatattttaataaccaatgcagtagagctcagattttttttttttttttgaaagtctcactgcatcacccagggtggagtgctgtggcaagatcttggctcactgcaaccctgcctcacgggttcaagcgattcaagtgcctcagccacatgagtagctgggactacaggtgcacaccacagtgcccagctaatttttgtgtttttggtagacagggttttgccatgttggccaagctggtctcaaactcctggcctcaagtgatctgcctgcctcagcctcccaaagtgctggactataggcatgagccactgcacccagcctgcagtactaagtttcaaagaattagaagtacccagaacccatgtgaaaatcccatagctaccactcctgagtatggaagtctcattaagacagtgcaaataaaatatcaaaagaagtttattaaaatacatattttgttatacataaaacttagaaatatttcaagatttacatacatcaacttttgcaatcttcctgctggtaaaaatacaaaacagcagcataagaaccagttactcatatactcaactatattcatgcatacttaacaaaatgaaaagttctcctaaaaactggcaagatacaaaatgtcaaatctaaaatgatatatatacttacgtttttagcattcttacagattacaaacccttaccaacattaatcttggcctactttaaagttgagtgatagcatgaactctgaaaagagaatgcatgggttttctcacagctatatggccttggacaagtcacttgtcagttccctcatctacaaaaagggggttaaaaatattcacatcacagaaatgagattaagtagtttaacacataatggctaacatttcattgcttacgtgtttttgaaactacagggcacttttatggtgtgactagtattttaagtaatcagtgcaacttagtatttttatctctagctgagtatgtgtctctccttacctctactatgccctttaaatgttctttgcccacacaatagttaattgtgctaggtataagtctgattctaataataaattgatataatacagtcatcttagtgttaagacttattctcagcaggtaagagttttagaactagttccctgaaaaagctgtatttatgatagtttatgtgcaatctgtagggccaggagcatagtctaatctgacccagaatgtctttttgatttgatataggtaaggctcttcggtgatccaagagcagcccctttgggatttctggaaagcaaatcaacctgcacttagagttgcatggacagtgggccaaaagtcgtaacacatgcatcataactccagtccctgttaaagggaactaaagggctttgatttaattggccctcttaagcaaagctaataaaagattaagttgttgggccgggcgtggcggctcacgcctataatcccagcattttgggaggctgaggcgagtggatcatgaggtcaggagatagagaccatcctggctaacacagtgaaaccccatctctactaaaaatacagaaaattagctgggcgtggtagcagatgcctgtagtcccagctactcgggaggctgaggcaggagaatggtgtgaacccgggaggcggggcttgcaatgagccgagatcacgccactgcactccagcctgggcgacagagcaagactccgtctcaaaaaaaaaaaaaaaaaaaaaaaaaaaagattaagttgttggtacttttgcattagcttaagggaatgtggtagaaaatttaaatgagttaagatgaataaagtccacatgatgccatcaaaacctgttgcagaccaagttaccaacatgattctgttctaataagaatgagtttttaatccaagaactgatttgactgacgagcagaaaaaaaaacaatcttaaatttgcacaaactatagaatatgacaagtattagaaaatgctggcccccaggcacagtgtggctaacgtctgtaatcccagcactttgggaggccaaggtgggcagatctcttgagcccagaagtttgagaccaacctgggcaatatggcaaaacctcgtttctacaaaaaacaatttttttaattagccaggcatgggggtgtgtgccttgtcccagctgctccagaggcagaggcgggaggatcgattgagcctgggtggtcgaaactgcagtgagtcatgaccagacaactacactccagcctgggcaacaaggtgagacccagtctcaaaaatttcttttaaaaagccactttactctaacagttatccaaaagcaatagttttatttggagtgaatggtgataagcatttagggctcttaaatctatctcaaacacaggtatgtttgatcaaaagatctttaagccatgccttatcactttaagactttgttgcttgattttgaaacctttctatcatccttattcacccattcaaaagcttcaagccacatcaaaataaaggtatatgttctttcaggattttgctatatatataaagaactgtaaagccaattaactgcagtatataataatggtaaaagacaatattggtacaagaatgtttaaatgtcacagcaacattatgtcaaccatcataaagccaataaaaatgggatagtgtattacttttcaaattgttactagattctgtttcccaaagatttgactatttcagatataactttgacatatcattgctaaccaaaagaagcaacaaatataaacatttgtttatattagttgcagcactaataaagcttagtttgctctttatccatgctaccccattttttgtttagcaatgtacagaataagcccatttaaacaattcaggttgacattttcaatgggaaactattttccacacaaattccttcaacaaatagaaaatgtgacacagtatattctttaccttatgcagactgttagataaactttggtaaacagatagagaggcttcagaaaaccatattaaagtgatttcacttaaaaaggttatgatgtgttggttgaaaaagagtatcgacatcagtattactgaaattaatgtaactacaacaatgtttaaaatttttaaaaattcaacttccttttcatccttaccaggccaggaacatgacatcctttttggagaaattttcattttgggaatgagaacgttcttaatttgtccaatttctgttctgctccattcttctttcaatattttgcttactcgaggataaatttcaacgggttgaacctcaggaagtggtctttgtttcaagatctgtacatgctggcgtacatcatcaactttttcaagaaatttaagtggagactcttcttgtaaagatattgtcagtgccattaattcaagctgctgctctcgtatttccttcattctttcaatttgtggagtatattcttgattaattagattgccaacatcacagagagccgttaggaaacttttttttttctgttctaatgtatcattaagctccttaaaatactggagaacagcttccttatcgccttggatcattttctcagaatgagatttttgttctttcagcttttcaataagatgggtaagatctgtccagtgtgtgtcagtcaactgttcaagcagtttttgaggagtgtccttttctttcaaataggcactttgaaggtcatctataggatgaccatgatgttgacctatggtaaggcaatgaccacaaactaattttttatctaatagacagtaaacatttaatggttgcctgtaatgttcagggcaggtgacaatatctggatggtcttcttgctggtacttttcaataatagcccttagtgcaaaattaacaggtaaagattcaatgccagttggagcaatttcagtaatacttctgcaattagggcacttgagtggaattcgtaaaggtctccatatataaaagttaccagatgcctgaagaatgttttccaaacaatttctacaaaatgtatgagagcatggcagtacacgaggatcttcaaaaatactataacatatgggacaagttaactcttcctcaaaattgtgcatttcctgtcaagagaaaaatgtattttaagtttacatagagacacctgtacatattatttaacattctaggcattaacctccaaattgttaccatactgcttgtcatttaaaagagaacaaggtatttttaaaatgaagttttctgagtaattcatttcctagtatatatagtgaataactgatcacaattaagagtttattccttagggaccaaaatcatcccaaacaaagcaattatcattaatttgtagtaaaatgcttcaaatttaagttatttaaatttgttgctatgtgatatggtttggctgtgtctccacccaaatctcatcttgaattgtagctcccataattcccacatgttgtgggagggactcagcggtagataactttagtcatgggggcagttcccccatactgttcttgtagtatcacgagatctgatggttttgtaagaggaaaccccttttgcttcactcattctcttttcttgtctgccgccatgtgagacgtgcctttcaccttctgccatgattgtgaggtctccccagccatgtggaactgtgagtccattaaacctctttttccttataaattacccagtctcaggtatgtctttatcagcagcatgaaaacagactaatacactacataataaagactaaaattcaaagtgttctgttaaagtctacttagtgattacaactattttgtgcaacattttaacatttaagatgataaaatcaaaaccaagcacatataatgagtagacaagactatttctattacaacaagttaggcttagcaaaagtatattctttaacacaaaaggaggaaacatgtcccagttggctcaataatggtttctaaagcaagctatcaaatttctccacagtaactgttactaccataaattttttagcttctcaaattagaatacaagaacgcttaaaccccaggatcagcatagtataattctctaaagcaataattttaacttgcagatttagaagacagaaaaattttgaattaattcttataataaaaatcagtttgaaagataagagttgactatagtaactgtgaattaatttttaagtgaaaaactagagcactaaatggtaaagaacaaaaagaagaccattagtcatctttccttcatgaaagtctctcgatccgtatttctctgagacagaaaaagaaacgtagcgatagttcagagaccatctctgacacaagtaacttgacctcttggcaagctactactgatatttccagtaacagaagcctgaccattttgcaccctaccacctcctactgctttcctttatacctaccctcaatgcatcagccacaattctaaagactagcttaccccttgatagagaaaaatcaagttataccactgttgaaagtaccttaggcaaaacttaaaaacccaagtgccatggccaggcgcagtggttcacgcatataatcccagcactttgggaggccgaggcgggcggatcacctgaggttgggagtttgagaccagcctgaccaacatggagaaactccatctctactaaaaatacaaaattagcccagtgtggtgtcaaatgcgtgtaatcccagctacttgggaggctgagacaggagaattgcttgaactcagtaggtggcggttgcagtgagccaagattacaccaccgcactcatctggacaacaagagcgaaactccgtctcaaaaaaaataaacacccaagtgccattcacgtaaaatataaaggttaccaaatcacatgctataaaactaacttttaagattaaaaatctgtgaaaacagcaactaaaagtaactaactgcatttttaataaaatgcaaacttggctccttatctttacgatctgtcaaactcttaactcttccttcaaggctcaacttgagcctgccttttccccagattaggtcccctgttattctcattaaacactgcatttttacttcatagcactttaacaagattttatttaagaattttgtaacttttctgtatacattagaatgtaggcctcctataagggcaggaattgtgtctaaacaatggttatattcctgcaatttaggcacaaattttaacactgcaggcattcacttgttactgcttcaatgaacaaatgccttttcagagacctgtgttaatacagatttttgttttggggttttttgttttttgtttttttaatagcaaaatctctgcttaggaaaaggtgtaaaacgaaaatctatcagaaaatactccattcaggccaggtgcgggggctcacgcctgtaatctccgcactttgggaggccgaggtgggtgaatcatgaggtcaggtgattgagaccatcctgcctaacagggtgaaaccccgtctctactaaaaatacaaaaaaattagccaggtgtggtggtgggcgcctgtagtcccagccacttgggaggctaaggcaggagaatggcgtcaacccgggaggcagagcttgcagtgagccaagttcacaccactgcacaccagcctgggcaacagagtgagactccatctcaaaaaaaaaaaaaaaaaaagaaaaaagaaaaaaagcactccattcaaactgacaatattcagatcccgaatgagccaaagtgtgtcacacagagactaagcttgaactgtagagcattccagcaaattaaagtaattgagcaacagtaaagaagatgacattcactgcagataaattcaagtgagtgcatgctggcaagactttacaactttaccctacacctacagaaagctatgaagtcatacagaaaccacccaagaaaaacaaatgtgtttttcagagtatttcagtgatgtcagaattcacattgaaggaataaacagaataacactttgtaggaaataaaatttgagcagtcgacgtacatttaatctagatttaatattactggagctattcaattgtttaagtagcaaaactagtcctaaaacagaatctaacttttctatccaaacccctattctatgcttgcagaaaactagggaacaactctgagaatgcacttaggggcccaaaagctcaactttctttagaatgagaatattcatgacattgtaaagcatatcctaagcttatataaaatggaagcaggccaaagcaggtggatcacttgaggcaaggagtttgagaccagcctggccaacatggtgaaaccctgtatctactaaaaatacaaaaattagccaggcatggtggcgcacacctgtaatccctataatcccagctactcgggaagctgaggcatgaaatggcgcaactgcactccagccagggcaacagagcaagactctgtctcaaaaaaaggaaaaaaaaaaaataggaagcaaaaatcgtggttggtctcaaagttactgctatcatatgtaaaatttttaataatactttttagacaaaaatttgtggataacttgaagttcacagaagtcaaaatctattctcagactacccttttctcactgatttattgattaaaaactaattttaggcaacaaattcaagagaaactagaactgaaaaataactttgtaaggtcaggaactttctgactctggttgctgcctgagaagtaaactatataggtgggccaggtgcagtggttcacacctgtaattccagcactttgggaggccaaggtgggaagatcacttgaagccaggagttcaagaccaacctgggcaacaccaagagacccccattctctacaaaaaattaaacattagtcaggcacagtgatacacgcctataatcccagctacgcggggagctgaggcaggaggatcacttgagcccaagaagttgaggctgcagtgagccacgactgtgccactgcactccagcctaggcaacagagcaagaccctgccttttttagaaaaaaaaaagatacaggtggctaccatgcttacaggctagttctttcagaaaccaatatgaaattttatgcagcagaaattttccacaaccagtctaggcttctgaaaggaagaaaaagaacaaaaaattaacctatgtatattttctaggatgaacatcttggatttagctatgctgtatgtaggtttccaaacagtaaaaacatcagtaacactggaaacaataagacaatggagtaatgcctttgatattctcaggggaaaaaaaatggcttctgaaatggaaattaaaactctatacctagaaaaaaaataatccatttttatataaagacagttggacaatataagatctcaaaaatgaacaaccttcttccaactctttctaaagaagctactgcagggagaaaagaaaagcaagaatgttcgccagcataatggcgaaatgaagtccaggacaactgtgaaagcctagggaagagtcactctagaagaggaagaaagatccaaaagacagatctttttttttttgaaacagagtctcgctctgtcgcccaggctggagtgcagtggccgctatctcctctcactgcaagctccgcctcctgggttcatgccattctcctgcctcagcttcccgagcagctaggactacaggcgcccgccaccacgcccagctaatttttttgtatttttagtagagatggggtttcaccatgatagccaggttggtctcaatctcctgacctcatgatccacctgcctcgacctcccaaagtgctgtgatttcaggcatgcagaagacagatctttaagtaaataaatggaactgacagaaatgcttcatgtatatgaaacatattgagaggtaactaaatttagggaaaaaacgtgatagaatcatgaaaagagaggaaatattaatattatagtatatggctcagctgtcactgtaacagtcataatattgtaaatatcaaatactgattttaccaaagagtaacaaaattatattgagggggaaaataagggaaggaaacagtttaagaactaaatcttaatttttccttataagaaagtcaatacatacttaaaaaataacccacaaaaaataaatatctagaaatataaaagaaaataccaaaagaaatgttaaagcagataaaagtgatggcttctagagggaaagaatctgtttttcattataaatcatggtttcgcttttaactattaagcaattaaaaatataatacaattttaaagaaataagaacaattctacaagtatccacacagaaaagaaggatgaaaaaaggaaaactaaaccaaaggtctcagaatcctcctctgggagactggaatttccaaaattggaatggccacaataattatctcccacatgagctgtcctataatgtgactttgctgctactccctgcacatggagatgaaatctattctcccccattagaatatgtgtgggccatgtgactgttctgaccaataggatacagtataagtgatgtggtgagttctaggtatagcccttaactagtttggcaggttgctgcctcggagccacaaactgctatgtaagaagtccaggctactttgctgaagagacaggccaaatagaagggcaaggagtttccagacacatgagtgaaaaagacatcttgaatatctggccagccaagctttcagatgtttgttacacagcaggaaataaccagaacatcaccagcaacaaggaatgctagaacagaatgtagcaatgtccacaaagactagaaggaaagggatatgagctgagaattctgtacacagccacgacataatttattcatgtgaaacaacagaaatactcttcagtaaaatctacagagctaaaaaaaaattacatgggcagagctgacaccatacactttacttaccaaaccaaaaggaatataaaataattcaactaaaaaaaaaaaagaggaaaagtggaaaaaaaagaataaaaattggcctggtgtaatggctcatacctgtaatcccagcactgtggaaggccaaggtgggaggatcacttgagcccagcaattcgagaccagccctggcaacacagtgaaaccccatctctacaaaaaataaaaaacttagctaagtatggtggcgcacgcctgttagtcccagctactcaggaggctgaggagggaggattgcttgagcctgggaggtccaggctgcaatgagccatgagccacggtcgttccactgcattccagcctagactacagagccacactttgtctcaaaaaataaaaaaagaataaagataaatggaagatgataatgaactagaaaacttaaattgctagaactggctgggcactgtggctcacacctgcaatcccagcaccttgggaggccgagacaggcggaccacctgaagtcaggagttcaagaccagcctagccaacatgacaaaaccccatctctactaaaaatacaaaaattagctgggcagggtgacagacgcctataatcccagctactcgggaggctgaggcaggagaatcgcttaaacctgggaggcggagattgcagtgagctgagatcatgccactgcactccagtctgggtgacagagcaagactctgtctcaaaaaaaaaaaaaaaaaaaaattgctagaactgataaacccaagagatggctctttttgagactgagtcttgctctgtcaccagggctggaatgcagtggtgtgaccatggctcactgcagcctcaacttcccaggctcaaacaatcctcccagctcagcctcccaagtagctgataggtgcatgttaacacacatgcctaatgtttttatgctttgtagagatagggtctcactacgttgcccaggctggtctcaaacccctagcctcaagacatccttcccccctcagcctcccaaagtgctgagattacagctgtgagccaccatgaccagtctaagaattggttctttaagtaaataaacaagccattagctatctgtgataggtagcctctaaaatggcccccaatgacctacactttctggatactcttgaaatctcctctcccttgagtgtggactaggccctactcaactgttccagaatacaaatatgaaaagtttgctaaatattttgaagacagtataacatgattccaaaacctgagacaatacaaactaaaaatggactaatttcaaaaatggacactgatgtaaaattctaaatacaatgttagcaaaaacaaacacaggagtacattaaaaaaaacactgtaccatgactaaataaggttctttccagaaatacaaagttaattcaataacgaaaaatctattaatataattcagtcaattagttcaatggaaaaaaaatttacattcacattatatgtgaaaaaagcatataatatatataatatcaaaaccaataagcagtcctcaaagacagaaagtagaatggtagttgccagggcttgagagcagggaagatgtagagttatcatttaatgcaggggtcctcaacccttcctacccaccctgcgcccccaccatggtggcgggcaagcccacctgagctccgcctcgagcccacctgagctccgcctcctgccagtgtcagcattagattctcataacagcgtgaaccctactgtgaactgcgcacgcgagggatctaggttgtggctcactgtgagaatctaactaatgcctgatgatgtgcggtagaacagttttatcccaaaaccatgcaccacccacccccacccgtccacagaaaaattgccttccacaagaccggtccctggtgccaaaaaggttgaggactgctggtttaatgggtacacagtttcagtttgggaagatgaaaaagttaacggagatagttgatggtgataattacaaaacaatttgaatgtatttaataccaccaaactgcatacttaaaaagattaaaatggtaaattttatgtttagcatattttacacaataaaaaaaaaactttaaaaaattttcaagcgtcttgcctattatccagtcttccttttgctaaatgaatttgaatcaatttatactactgtatgtttttaaaaagcaaaaaagtaaaataatccatgtaaaatgtattttcctctagtgagtactaagctcatgtaaaaaccaagttcaagatttcctgcttctcttttaaaaccgagaaatattaatataaaaaaatgaatcttctcagaaagaaacctgaggctaaatcactctacttacaaattatttcactaatgtctagtgtgtttaagtgtcaaaacaaatacatttctgaatttccaaactttttattaagtctttctccagagggccaattcactagtgagcctccctgatgtctaactggcatattaggtaatagacagtataatagatgattaaatagcaccgaaaatatcattacccattctcctgtgtaaaccagtttttaagttttaattcactaatgctttcctgcctttcaactctaaacatgaacagttgtaaaacgttcattacatttcacaacctctgaaaggaaaatatatttattacattatagaattcgatgacttgtcccaagacttctagtgagtcagctttaagtatgggaaaattcaagtggtgccaccacccaaactggggctcacatctttgtggacctaactgataaagaagaaatacatttcatgcaagtcaagacttacttaagaaataactacaactgcaccatttataaacatatataagatttttttaacattatcgcagaaagtctgagaaacaagatttttaaaaataattctgtcacatataaatatacaaaaatagtgagagatcaccttaactttttcaaattaaaaaaatcctatggtcagctgattttaaatctctttgtccatctgtactattttctttcattttgatatcaacctgtttccctaaactaaaaaataaaaataaaaactagaaacaaaacaaaaaaagactattaattcaatttaaccggaattgacttgagaaattaaggctttaattgcttttgctgtacttttcaaagtaaaaatatatctggtgggaaatattcatcaacgtgtttagtgaaaggcaatgtcaaaactaacatcacctaaaatcaaaatttcaccttgccagattaaatagctacttactcatttaaaaagaccaatacatgaatgcatagtgaaaaagtatccaggtaacttaatttgcagttttgtgtagttctgcagatctgtatgtataaaataacaactttgcatgtgttttgagatgtacacattcttgtaaaatttctagaaggatgtacaaaagagttaagtgactacttttaaggtacagatcagagaagggagttgtttatttttcactttatgctccgctccttcgataaaatggttggagttttatacaccgccaacacaatgttttttcaaaagacttctaaatttcactttgtagtttaaatcatacactctgtaaaaacttaattgtttttcatatttatttaatctcccagattacctactttgttgatctcgtggtttgggggctgaatacactcttctccaactcctccagaatcttttattcttattctaaaattaaaataatgttatctttaatgttttcaatttattgtctcatgtcataaaaatggttgttagttcactgtctttgatatttatcttcacgatgcttcatcgtgttttcagaaaagccacaaacaccaacacagttgctggagctgcagtagaggtatcgcttgttccttgaaaatcctaactctgaccaaacagactgtcacaaaggacctcttttcacaacgtcaagtagcttatgagctctcgacaatattacccaacaatggtgatggcagaaaaaacattcacggtcattttagagtgcttaaaattaactgcaagacaaaagcatccatgggagtaaaataccttgccagctctaaattataactgatttagtatagtttgctcatctctctgttctgccatttcaatgctgtgggacctgggtcagtattaccaaatacctctcaaaagtgaggcttcacatctgtaaaatgggtaactgcacctacctcacttaagtcctgcgagcacctcccacaaaggggctcaaaatggcagtactcttcccttccccttctcaaagctccactctcccaggcctccctcctaacgcgcctccacctcggcacccgcccgtccccaaccccgcgggactgaccgactcggcggcgtccgctcagctcaccctcgccaccacagagggcctcctccctcacaggaacgcagctccacagtggagggacgggaaagtggctccccaaactccagtatgggacaagagggaatgagtgcaggtcccaagccactccctccatcgtcgcgcccccaggactccccgcccaacacactaggcacaccagactgtgctacaggaaaagaaaaaggactcagaaccaccttctccgcatccgtaaaggtccttagactcaccgcggggaggaagcggaccaggcaactccacagcacggaaacacagcgccacgagctccaggcggatgctgagagccgccccgagtccccgccctcctctgccccgaagggcttcaggtgcccagaccgggcggggcctcgcggagcctcgcagcgcaggcgcagtctgcaggcaacattcaactgcaaggcatcggccaatgggaactattgctgggctcgttcgaaagtaaacggtggacggcgcggcccgaggcaggtggcgggagtcagtttaaggctggcgcccagctttccgcgcctgcgtgctaggcgcaggccgcctctcggaagcttggcctcgcaggagcggctctctatcctgtggggagcttcggccagtgggcctcgtgagctggggtcccgcctggggaatccgcatggcaccggtggtctgggggagaggctgggcctggcgcgggacgaggcgaagcgccggtggccgacggcttctgaggaattatcttttacttggcgccacacggggcggggcctcctgctatgctgtggagcgcagtgtcttccatcgttgcctcacagacccgctgctccgggaagtcgccacacattctcagggaacacccacatctgtcgcctgcgccctccgccgctcagctgtttgcttttgtttacgcattccggagacctgacccaccggagcactgggctgagcacaggagaaggggctttggagcgctctttgtactcaactccaagagcgagtgggaaactcaggactgggttgggtagatccctgcgtctctccctagccttcgtcctcttcccccgtttttccactttatgaaagtattgcctagagatgagggctgtccaactcaacacttccaacttcaagttcctacttcacctctaactccctagagttagaaaacaacgtacagcttagaggttcctttccctttttttcttgagaaactttattcagctttatctcaagacatcaccgcttccctctcctgtcaaccttaaatagtgaggttctggaaatatgattaaggatagagtttattccagcgtaaggcttgagggtagccacccaggagacaccagctccaaatggggttagcattccaaagtgaagaagttagggtttcgcctaggtggccagagacaaattttaacaggatttcatttcccctaagagaccagtgcatacttacagctatttggtaggttacagattactacattccaagaaaaagtattttgttactccatgagggggggtagtgatctcagggggttgtatctctggtatggtttggtcctcctattttaattatttatagaaacaaaaggcagacgttgcagatgcctgctgcttgactcaggctgtagccacattcctcccaaggctcggaataaagttccaacagctttaagtttgaattatttaacttccaataactataaagtcattttgtttactaatgtgctaaataaagatatgggctctaggccaggtgcagtggcccaggcctgtaatcccagcactttctggaggccaaggcaggtggatcacctgaggtcaggagttcgagaccagcctggccaacatggtg

SEQ ID NO: 274 - DNA, 44585 bp, Homo sapiens
  source 1..44585: mol_type = genomic DNA
tccctcctgcagggcttgaattctcaacaaccccttcttggcttgtcctggactctgaagaggtcaaattggtctcttgaattgctgtcattttaaattcattttgacaagtgtttaattcttctttatcacaacccttggtctgagagtgatatgcaaataatggctattctgccgagtgcaaaatgtgcagtatctctctgtctgatctgtcaattaactctgggtctggcccaccactttgggggtggtcctgagcaaagcagcctctagctcttgattccctccaatagaaagcatgttccgggctctgtaaagatcttagcagacagcagctgccaactgtgatgccaagatgtgtgtggggtgtgagtgtggagttttgtgtgtgagactgtgtgcacatttgcattaacggacagacacaagggtgtttgtgaaggcaaagtatgcatgtgcgggtctctgagcttgtacacacagtgcacgtgtgtgtgattgtgtggccatgagtaattttggtgaccagagttatacaggagaatagttgtggagcccaaatctctggagttgttccctctttcctgcacccaaaaaagttcagagaaatgtgtgcccagatggaaagagatccccagagagtctaaggaagtgccatcaaaggacacatctttcctaagtttacgtctttttcctaagtgcctgttgagggaggaagatggtttagttctttcccatgaccacctgctttttaccctcaaaaaccaccattttgagccgggcgcaggggcttatgcctgtaattccagcactttgggaggccaaggcgggcagattacctgaggtcaggagtttgagaccagcctggctaacatggtgaaaccccgtctctactaaaaatacaaaaattagccgggtgtggtggtgcatgcctgtaatcccagctattcggggggctgaggcaggagaatcacttgaacccgggaggcagaggttgcagtgagccgagatcatgccactgcactccagcctaggcgacaaagtgagattagtctgaaaaaacaaacaaacaaacaaacaaacaaacaaaacactattttgggccaagaggcagtggctcatgcttgtaatcgagcacttttcgaagctggggcaggaggatggttttagcccaggagttcgagaccagtctgggtaagataacgagaccacatctctataacaaaaattttttttaatattagccaggcatggtggcatgtgcctgtagtcccagctactagggaggctacagtgacaagactgcttgaacccaggaagttgagtctgcagtgagctgtgattgtgccactgcactccagcctgggcgacagagagatcccatctcaaaaacaacaacaacatcatttcccatcacagtaagaaataaaatccctagggcacaaaggctgaggaaattctagtcatggtcaatggttccaaaagagaattccacatttctggaaaatagtttattaattcattataaggacagatacatgaatcaatgccttagcttaacactaaagagtatcatatttgtaaggagaaaaaaaaaacgctggaaggataattaaatagtacagcataaactaaatacagacaaataaatgagcaagtactgattacacttgtcatgcatcaagaaaaggaagatttttaattgagactcagaaaacttaaggcatcaatggtaggtgacaaagggattaataccctgtaaaaggccaatagattcttttctaataaaaatactgctacaaagacacaaacctaacacttccaaattacccagagcccaaatcatatatagtgctagtgagaaatggccactttcttatcaactgtgagttataggcagataccagatttattacttatttgcttttgagaaacaattttccacccaacctaatgggttataaattgtctcatttgcagctatttaatttaaaccagaacctcagtgcctgttaaacaagaacatgaaaaatgactatgtggtataatgctaagagcctactgttaaaacagccatttaattcagggcagtttttttttcttctttaaaaaaaaaaaatcaaaccagcaaaataaaatgaggcttttgaccttcagagcaatgatgaaacatacacagtggtgttagccacagcagcgctgaatgctacagaaatactacaagtgacaattctgtctttaacgagatacaaaaccaacattaataatctttagtgttatcataggctggctgaaggagggggaggaggtggaaacgtaggtgcagacatcaacagtgagtgacacccgagtataataaacacagatgctttcagggtttgaggaagccgcaactgtgctgagagacattccaccatttaaaaaaaaaaaaaaaaaaaaggaaaaatggactggttatttcgaatttggcccagaaggcagagttaactcttgatgtgccaatcagacatcattagggagtaaagaccctaacattctatgctcctatgagagggctgaggtgaaaaaccaaataaatgacattgttttcactacacagaaaatagaagtcaagcttgtccctgtgcggcaggtgaacagaaaatgacttgaggattcaatttaaagaaaaaacaaactgaaatgagctaccccttttcctgtgcaaagacctccttgccagcaccccagagggtgagattcctgtcatccccaatccagatcaagtcaagcctcacagggtgggaagggcctccctgaactctcactccccttctcttcctttagcttcttctggaagagaggcccaaatcatctccatccagtaaacttgcccccctgcatagaagggagggcatctttttattctgagcctctggatcacagcccccttccctgtctcaaacattcccctctatgacttggatccatccatggagaacccttggatcccaatcccaaaggcaagatgcagggaagccagaagatcttctccacacccgcactgggcgtgggtgggctgcctggggcagggcaagcagaagcactgagtgaagaggaggcaggaggatggcaggcgagtgcgcggcagccgcggatacaggaagggcacgggggccttgaagcagacatgaggtagtcacgttgttagagaaggatgcagagtttgaacccaggcaggagaacaagatgacatagtctgggagaggtgtgagagatagcagaggaaggaaaacaggagagaggaaaggaaagagtatctgggagcaggagaagggcactggtgctgggagagcgaggtgactgggagacagaacactagagcagccaggggcaaggaaggaggggaagagtgagagaaagcggattttcaaaaccaggcacttcccagattacaaaattaaatgcagagttgctcggaggggagccagggccaccctctctatttgggcaataaggagctgggaggtgatgcagctgaaatgccaggcattcagagcctgcttgcacccaacccagccagacaggagaatgggctgggactgtctttgtcagacaggcattggagacactctcagagtgtgtaataaaaggctgggcgatggaggtgggggcccacagggctggggactgaccactgtggggcaccgttctgacctggaggaccaatcaggctgtagtgaccactgcctgggccacggtttcccagctcaacaaccagtacgcatacatgcacttcacacatgtgcacatcacatgtagctatgtctcgtatgtctttcacatgtcacatgtgtatcacaaagagtatggggggagtgaataatccatgttttcctctcccctcagccaaagcaacttaggaagctccaaagggcttgatgatgtatctacaggcacacatgtggacatacacggccacaggtatcgcatcctatgtgatccatacctgcctgccccaaaccacatcctctgggaagagctaggcagaggaggagaccggggatctgggcaggcctgggctggctcctagagggcagggggatttgagctggcagctatctccaggggtctcctctagcacctcgcctggctggaggtccgggtaggagcaggaagcactggctgcctctggcaagcaggtaagtctgtctggcccgggggctgccagctcacaccctcccaactccctgtccagccaggctgccccctgccctggatccccaacacccgagatgagatcaggagcctctggaggcagggggtcctcaggctccaggtcttggagatggaggtcagggttcccgttagatgcactaaagtcagagtggacaatgacttcagcctccacctggttcctgcaggctgggggtgacttcttcctcccattgccctgatcagagcagagaacacaaagacaaagtgaccattactgagagtaatcatcagaatgaccagcgtacgtggggcagaaagtctgaccctccatcagagtaagtatcacatgggagtcggtgaaggatacacaggaactgttcgaacctatacaaaggcagggaatgatggaatacttcccatttgccctcatccaggagtttcaggagtaccagactcagtcagggcctctggggacaggaggaagggctgagcgtactcaggccagccacaccctcagatccacggaactgctgtggcccacttaggtctgggtagaggaggggctgttttcaacccaggttgaaacaggttcctgcaaactggcctgccctccacctactcaacctttggaggctccaggggtctcctggctagacttctatccccaggaaagttaccacccaggggtctccagagaactcattacttcctcttcacaagcacagagaccctttcctcctttcctgccccttccttccaggacgctgacctttatggcgtcgtacaccagagcctgcagcaacagcgtctgcccagttccagcagggggcagcagggcccgggtcagagccggccgggggcctgcctggggcagctcacagcctgcccaggaaccagcccagctcagcccgcttggttgagcccaggagatctgcacgggggaaagaaggggacagtaaggggcacgaccaggattggctgggagagggaagcccgggggagggaattgggatgggccgcgggggagcagggtccagactgtcacccgctgctctctccctctccaaggctctggggaggagcatcgaaagggctcagagtcagcggggtaatctgaggatgagtcctcctgcagaggagcggaacaccagacgctctgcaaagcccgcggtgtccgagccaggcggggagagggtgagggaggacgggtcggagttgggtgggatgtgccgcccctgccagcatgaaagggaccagcccagcgaaggcctcaccttatcctggtcccagtcccacttggccacagccaagccgactggcctcttctccccacacggggatgtctgggtctcagaggtctccccagctccagggatgaggagggagctgggtgttctggctaccctgggtcacctgctgggaggccctttccttcgtgagaaccaagctgacctattccgccgggatatggaggcccatgtgcttccctgacagccaaccattccgtggaggagggagagaggccctagcgtccgcagccggctccgaagaggaggtagagccatgctcgcatagccacgcgttgtgctctgtcgccccctggtgtcctatttagaaaagagccgcaatgtggggctctgacttacctttcttttggagtgactccggccttcagaaacaccgccacccataaggctgtgcacttcagccctgtcctccacgtctgagggtggcggggaccagtcctggggatgggggtgcacaagggactccaattcatgggcagctggggggctgggggggccaagccgagctctggagtacagcgcgggattcccgggggtggcggtggaggacaggcctgggagggattccctggaagggaagacggaaaacaaggcatagcggtcagagtaaggggtcaggcggggctgggatctggtccagcctatgtctctggggaggttcctgcccatctctgggatttgctttcctggtctgtgcaatgagtaagaaaaactgctattgttcaaaacagcctgatgctgtaaacagggctcttcttcccttggctgcaggcatctggagatttggggcccctctttccaagatgctggcagctacagaggaagtgggagtgaggcagttctgttggccttgctgaggagggtaggctggggctcccctaagtccactccccattctcaggaggacatcatccctgattccttcatcccagagtcctgactttaacggggctcctgggagtgccaagggcaagtcatggccactttccctgatggcccattctgcagcccttcctggaagtctcccttccctgaagtcagactggctcccctgctcacctgtgggggctgcggcgcaggccagcacacatgcaggccaggaggcagaggaggcccaggcagacacccacgatgatgcccgtgactgagtgcatgtccagcgagtctggtgggggagagagaggcacagagcaggtcaggacagaggaagggcacagggcatagatcaggactatccatggctttctcaggagacaccagctggaccctcacccttcagatgctcacaatcttctgatacaaggacaggagggccctgagcctcacagaaactactactacctctccctctgactgtcctccctaaaacacacccagaagttatggtctctctgcctcaaactggcctttggtgaagcacgtgttgcctgctcccagggctgttgcatgggtgtgcaacatgtgcaggtgcgcagaccccatgcttggatggaccccacgcttgagttcatgctctgctgtcaccaccttaaaattctaattttttttcttttgagacagggtcttgctctgtcacccaggccggagtgcagtggcatgaacacggctcgctgtagcatcaacctcctgggctcaagtgatcctcccacctcagcctcccaagcagctgtgaccacaggcatgagctaccacacccagataatttttaaattttttgtggagacagggtctcaccatgttgtccaggctggtctccaactcctggcctcaagtgatcctctcacctcagccttccaaagtgcataagcactttggattacaagcacaagccaccatgcccgacctctagctttttttgtttttgtttttgtttttgagacggagtctcgctctgttgcccaggctggagtgcagtggcatgatctcggctcactgcaagctcctcctcccgggttcacgccattctcctgcctcagcctcctgagtagttgggactacaggcatccaccaccacgcccagctaatttttttttgtatttttagtagagacagagtttcaccgtgttagccaggatggtctcgatctcctgacatcatgatccgcccgcaccttggcctcccaaagtgctgggattacaggcataagccaccgcgcctggccgtccgacctctaatttttaaaataagggatagcaccttttcattctgcactgggccctggaaattacgtagccagtcctgctgtccacctccacaccataaagctcatcacctcaccaagttaatcctccaatcaaagcaatttcccaaagaaactggtctctaaagccagtcccagctggatgcagtggctcacacctgtaatcccagcactttgggaggacgaggtgggtggatcacctgaggtaaggagtttgagaccagcctggccaatgtggtgaaaacccgtctttactaaaaaatacaataattggctgggcatggtggctcacgcctgtaatcccagcactttagggggccaaggtaggcagatcacgaggtcaggagtttgagaccagcctggccaacatggtgaaatcctgtctctactaaaaatacaaaaattagccgggcatggtggtgtgtgcctgtaatcccagctatttgggaggctgaggcagcagaatcgcttgaacctgggaggcggaggttgcagtgagccgagattgcgccattgcactctagcctgggcaacaagagtgaaactccatctcagaaaaaaaaaaaaaaagccagtcccccacgaacctggcctctgaatcaagttatcactgaaccacacctatttccccttcacatttgctctgcccccaccaaacctggaggacagctgtgcaaaacaatgaaattgtagttgtgtccacaggcaggggcttggaagtcaatccagggaaacctgggctgccctgtgctcatacctgacagcttctcctggagcgtgatcacatcctgcaggcgggagaaaggcccaggtcccacctctgtgcgcgcccccatcttgaagaagtaccgagtgtcgctctccaggccatggacctcagcactgaagatgtttcctgggggtgagggaggcagggagagcagggatggtggatggggtgggtggatgcagaggtgggcagggaggggactgggagagtctgctctccacttaggcagcagcttctgcttgcttctcccagtagcccctggaacaaaccccagcactgttctcactgctggaagcgggagaggctgggaagctcttgagcagatgccctggggcaggagccctcaccctgcgtggtgagcaaggtccactggtgctcaggctgcgtgtggttgctgctgtacaggatcagatactccacgatctccccgttgggctctgtgggggggcaccagtgcagccgaaccgtggacggtgtcagggggctcagtcgcaggtcggatgggggtgtggagggccctggggtgcgggagaggagatggggagagatgtcagagctgggggacagagcatgatgatatgacctcccttcttcctccttcatggaacaagccacaaagcaaagatgaggtctggtttctagttggggaattctagaaaacagtatgtgtggttggagggacttaacattcctcccctcccagaaactcttctgcccccagctctgcccaaaccttggggttctgaagtatgtttcttgctgctggggcaagaaggagttgggcaaaagatgggttggtggcaaggggctgggagccactcacggtcaggcagggtggagcgctccaccacagagccgaaaggcccatccatgtccacgccgtgagactgcactgcaaactcgtatttggtgaatggcttcaagccgccaatgaggatgtcttctccagaactgctaaggcaagaaacgtgactagtgctctcaggcacactctcccagcagggcagactcctccaaatctactcccctgcagtcagccccagccccaggctctaccctgggaagggaagctgctccctggcctggaggcgactaccaccacccagggacctacagagaagtctggatgtatgctgctccaagtccaatctcgaaaccagaccccttcctccaggaaaccttcctggattaatccaagttattctccacctatggaatcatctccgatgcatcttttctttggcttaattttgccttcatggcagttgtatatatcggttgctttttatgcgactttcctccgccaaacctcaggctcctcaggctctgtctccccatctaacagggtagagggagcagctctgaggacaggggtggggttctcttcaccatcagactgggagccctctgaggttggagaaacaggtctgtcctgtgtcacattctccggagtttgagaacaaggctctgttgtgaggggacgggattggatggcctccttgctaccatctggtcagcaggcaaggacgtggaccctgtgcagcccctctgtgtggcctcagcgtaacaggtgagccatgacatgttcctgaatcccaggggcccttccctgatcaccacctgctgccttcccaccaccaccccccacctattcttcctcccttctttacattagtaaaggcattagtccccacctggtgtaataggtgaccagggaggcattcctgagcccccaggggctgaagcgcacagtgtagttgacaatcttgactgtggtgaaatctggctttttccaccgaagccagatggatgtggagctgtttgattccgcatggacgtgggctggaggcaggggtggtcccctctggataggcatgtctgaaaggtgaaaactagagtgtgaggaagggagggaggatactcatccttaaatatgtatagtggtttacagttcccaaggctgtttctttgacccactcctttgatcctgtgagttgagtggcatcattcctacttcacagataaggcaattgaggcttccaagaatttgatttttgactgtggaacactagtctgtaagaacgtaataaagagagaggcagcaaatcacagcaatgaataaccatggaaccagactctggaaccaggctgccttggttcaaattccagctctgacacttactagctgtgtgaccttggagaaattacttaccttctctgtgtctccattcactattctaatgatagtacctacctcatggggttgttatgaggattaaattatttaatattttaaaaatagataggaaattgaaatataataaacactatatttataagtgtttattttagaaacataaaataaaccccaagagagcaagaaccttatttgtgttgtccaccactaaattcccaaagcagctggcacttagtagacactcagcgaaatatttgctgaatgaagaaatgaacaaactggaattagaactcagctgggtgtggtggctcacacctgtaatcccagcacgttgggaggccaagatgggtggatcacctgaggtcgggagttcaaggccagcctggccaacatggtgaaaccccgtctctactaaaaatacaaaaattagccaggtatggtgcacacctgtaatcccagctgctcaagaggccgaggcacaagaattgcttgaacccaggaggcagaggttgcagtgagctgagatcataccattgcactccagcctgggcaacagagtgagactctgtctcaaaagaaaaaaaaagaacccaagcttcatggcttctggttgattactccctctgctaaaccatgtggctgggaagttaggggtgagggagtatcatgatgggcaactgaggtgtccaatgcagggccacaaggcagtgtagtgcagtggaaagagttttgcctggaaaccaggagtcccagttgtagcctaggctctgtgtgaccttggacaagttccttttcctctctgagcctcagtttcccgttaggtcacacagggatactcactcttcttagacttgagagatagtctgatagtgtgatgtagacaaatgtgtttttaaaaaaacttgttttacagtcaaacttggggtcgggagttactgatcaaccatagggtttccctctgttcaaactttggaaatcagcactattcatgggtaatgcaaataaggtggcaggcctaagacagtgaacaaacaagcttctctccatgacagaggctctctggagctaaaagaggacccctgatcctaggagaatgggtttgggcatgagctgaggctactaaagtacctgctcaccaggctggcccaaaggaaaagaagaggaagcggctagcagagccctcacctgagccctccccgccttcttcccccaccgccctcacctggtgccggcgccttctccgtcttgcccttccacactgctgcatagccatcctcatgtttgttgaaagccacgagcttcacctcgtacagccggccagggactggggaaggttacagggcttaatggctagggggacatctggggtcactctcccgtccacagagagcatcccatctctaacttcttcacacaacttgcccagtccccactgaagctacatccctccctccccctccccccagccctcctcacctagctgggtcagctcatactgcttcactttcttcttgagccggacaggccccacatcccaagcctggtctccacggccccctggcaggcgatcgccattggcctcctcctcagcccccacctcccgccaatatagtttgtagccagagatctgggtggggtgagggggtggctgccatgacacgaccagggactccatctttgcctgcaccttcaactctgcaggggcaaaagggactggggggcagaggagcaggatgggaaaattaaggaacagaatgcagaatgaggagaaggaggccagggataggagacagggaagaggcatgaggaagagacaggaagatggcattcagtgagagccttttgccagcattctcccaacacatcaccactcagccaccactctaagtgccagtcctgggcttggtctagaggtgaactcactgttctacaagcacagagtgcagggaatgcaggggtgtccgctgggcatttgcaaaggggtcagcaaggagcacctctggagtaggctgatagcacctggcacagaatcggcctctgtgaagtcttctgaaggatcaaacactgggggcagtgggggtggtggttgctgaggccaggaaggagggatgccaccattacagtagggagacccacttgagagtgaggagcttacaatgtgtcaaacactgtcctatgcactttgtgtagttattataactttatccttgcaaccctctaaaatagtgaaaatactacaaccttcgctttacagataagaaaactgaagctcagagagttaagtaatttacctagtgtcgcatagagagcatgtagaccggtttggtcagcatttaatcactcttctattgggcctctcaacaaaaacaatcatcatcaccatcatcctcgaagcagctacaattcaatgagtttttatgtactaagcactttagttacaatacattattcaacctcatgccattcctgggcagtaaatgaagcctcagaatggtttgtccaaggtcacacagcaaatcgaagggacaccagatcccagcccttcacctctgcacctaagcctcactcacccatcaagcggagggagccatggaaggtctctgatggagggcggggccagggggtggggcgctgggtcccaaggacacacgcacacccacacagtcacacacacactgtcctgtctctcctctaaccccgtaccatggctctggttgtgcatactgggcgtcctgtgatgcatccactgggagggggccccgaagccggctgctgtaccagccgaaatccgtactcgatacaccttgtttggctgaagcgagttcagcataagctgtgtctcatttcctcgcacctcagtagagaaaatctgatctgcagggacagaaaaggtgggctgctgggtagccacctgaggaacaggatcctaaacccccctacatggctcttccgcctcacatcccggttcctccgtgcccgtgggagcctgaggcgttctcagcactgacccctcagtgcctgggcagattctatggctccagggttgacgcttgagcctccaactctggctgatgcaggccatcagcctgggctcagctgcagggagaatgatggcaggctttccccacttccccaggagctgtcaatgaccatcccctgccaacacacacacacacgggatgcagacacaagaggctgaccatgaaggccagcaagaacgcctggcttccagagccctgagggccaccatggccacttcctcacccttccctccttcctcacctttccctccttcctcacccttcccctggtccctcagctaccttcctcctcctaactttttatccttttatttttttctgagacagagttttgctctgttacccagatgggagtacaatggcacgatcacagttccctgcagccttgaattcctggggtcaagtgatcctcccacctcagccccccatttcccagataaggaaactgaggcagggactcagtagaagtacacactgcagctgtagaggggttggggtgagagcccaggcctccctctgccttaagctaggcccctctgtcttcccttttcattcctgcccagacccctgtttttcaggttcacccttccccaacccctactctgcttcctttcctccgactcccgtaccctgctcaggtctccagcagccctgacagctcttcacgttgatcattcccatacatgcctgcagcccacccacccccactcaccttcctttcccaaaccgtattctatcttgtacttcaccacctgcccattgctcaggctggggggcaggggcagccacgccaccctgatgtccgaagggttggggctggacagggagagctggggtgctgcactggggactgagacagaagaacatcagcatgagctctgctccaccgacgtggaaggtgaggctcgggagcggtcagagacttgcctgggtcacacagcaagtcagaagtaggccaggaccaggatctgagggaggaaagggagcttctcaggggagccccaagctgaaggatgaggggacatctttcccaccctgaagctggaaaaagtcttggagcacaatcttccacgtctaatgggttaatgtcactggcccctaccccagctggatggcacataggtgtcagggagaactgcatgacacagggaatcatcacagacctgggcttaagtcccagctgaactactgacctgggcaaatcattctcattttctgggcctcagtttccccaactgtgaactgaggagaagaaccccgcccactctcttacggggcacaaaagatgatatgagcaggtaaaaatgcctttacattagtaaagagagggtgagctcccctccccagggaattctctttaccccaagctgcccactgcgagttcagaggccctaccatcatccagtgtgtgcaccagtgctggggtggaggtgcggctggctcccagctgggagtaggccaccacgtagaactcataatctgtgttgggttccaggtcccgaacctgtagttctgtggtgtcgttgttcactgcaaactggtattccacattgtccatgcctggtgacacgggggacaaggggactgtcatagtgccacccccccgtgctggctagctggagtctgtataggaatccttcatattgtcctggtgtctatttatagctaaatcatcccagataatctgagctggagtgtataaactccctcagcttcctgtctcagtgtattaattcctccactggttagggagtgctttctggaaatgacccccctctccagttagttaactgggatgggaggtggctccaggaacgtcctctccctcctctctcaacaaacatgactgagggaagcagtggcccttccagcgccagttgcctaatccatacctaccatacttatgcgggtctctcctatgggctcctaccccagtccatccttgccgcagaggtacccatcaggcaacccttcagtcatccgacctgaaccccttctggctgcgccccgcccgggcctgcgctggtgcatcccgccccaggccgacgtaccccgtgccttctggtagtggagagagaagccgatgatctgctcgctgtgcatctcgggccgctcccaggccaccaacacagcggagctgctcagtggcgtagcagtgacccgcgtgggggcgctgggcagcccctcgcgcaccaccacggccagcgacgcggcagcgcacgccattcccgcgctgttctcagccacgcactggtagtagccggcgtcctgcaggccgatctgtgtgatgaccaggctgccaccgccgccctggaccttgacgcgcccgttgggccgcagcggcgccccgttgtgcagccagcgcagcgctggccgcggctcccccgacgcgcggcacacgaagcgcgctgtgctcgcccgcgtccgcgacagcgcctcgggcgcctgagtgatggcgggagccgctaggggcgcgaggggcgacgctgagcgcgggatcccgcaactaaggtctctgccccccccccagtaccccaagcctgccccccaccgccctccctcgctccccttccaatcactttaacctctccctgattcaccctttccaaactactccggctcagcgcagacctaccctttcttctccccatttaccccagccccacaacgaccattctctttctctcccaaaactgtccccaggcctcctcagcctcccctaaatattgctcctcccggatctaaccccacccctaaatttacccatctccttcctccctgccctcccatatgtcccacacctaccagatctaccctgccccccagttttcttagtaccactcagatcactccactatccccacaataaccccagtcacaactccccgctaatcacccgctccaggccttaatcacccctctcgctccatcccagactcaacgccccgcactccgtcctccagttaccaagtccccatccctcgtcccacctccgccttactagggactcctccctgagttcgtcctccaggagagcgcctgagtgcccccagcacacccacccgtccacctccccctgctctattcaccccagccccagctaacccgctccctccgcccttcggcccgcctcacccagcacacggagctcagcggctgcagtggcgaagtcgcgcgtgcggggcttgttggcgcggcagacatagacgccggagtgccagggctgcgcgttggcaattagtaggttggtgcggcccaggacgatgacatctgtggagatgggcttcccgtctggggaaggagagggagacgcgctggaggggacgctagggactgcccttcccttcagtctccgaacctcaggaacactctgcacccggataaagcaaacacaaccgtccctggtccgaatctcatttcctcctcttgctgggactctctgagcccggctgtctccatctgtaagggggaattagcccttaactggcagggtttccatgaggattgaaagaatgtcagaacccctggcacagtgcaggcatatattaatcataggtgctcagcacactcgtcagttttcattactgaattcatttctctcaagaaggacatgctccttccctggggtcccagcccagtactatgatgaagctagggctggtaaggtcggaccaagccaacgattcgaatgcgcacaaagttttacctcaatgtgaaatgaaaaccatttaaaaagcccttgccttgtagacatgaacagaaaatctagagaagcaatgcaaatagccaagaaacacaaaaatgttcaacttcatgtcatcaaagaaaggcacttcaaaacagatgttaggctgggcacggtggctcatgcctgtgctcttggcactttgggaggctgaggtggaaggatcacttgagaccaggagttcaagaccagcctgggcaacatagtgagactccgtctctataaaaaaaaaaaaaaaaagatattaaaacacagatgttaattttcacccatcaacttgagaacatttttaaaaatagtaaattgcaatgctggagaaagggccataaaggagcttcacctaggccttgaagccaaggattccatttatgtgtacctgtcctaggaagatgatcagaagtacaggcaagtatttgtgaacagagcagatcactgcagtgttaactgtaacagcggataactggaaaggacttaaaaatccaacagcaggaactggtgaattacattatagctatatttaaagtatggaatattagtcattacaattttttgaaaaagttttaaagatagagaaatgcttatggtatactgttgaatgaaaataggacttggaactataaatgcggcacatgttctcaatttcagggagaaaactgtacataggcatagaaaaacctgaaagaagatatactggtacataaacaatttttatctctgagtagtggagtgtttgagtgttttctgcatctatttttttcctagttttctacggtgaacatgtacaacatttgcagtcagaaaacaaaacagccggacacagtggctcacacctgtaatcccagcactttgggaggccaaggcgggtggatcacttgaggtcaggagttcgaaaccagactggctaacatggcaaaaccccatctctactaaaaacacaaaaattagccgagtgtggtggtgcatgcctgtaatcccagctactcgggaagctgagacaggagaatcacttgaacccaggaggcgaaggttgcagtaagccaagatcacaccactgcactccagcctgggaaacagagcaaaactccatctcaaaaaaaaaaaaaaaaaaaaaaagaaagaaaagaaaagagagagagagaaagaaaacaaaacaggccgggagcggtggctcctgtctgtaatcccagcactttgggaggccaaggtgggcggatcacgaggttggatcacgaggtcaggagatggagaccatcctggctgacacggtgaaacccagtctctactaaaaatacaaaccattagccaggcgtggtggcgggtgcctgtagtcccagctacttgggaagctgaggcaggagaatcgcttgaaccgggaggcggaagttgcagtgagcagagatcgcgccactgcactccagcccgggcgacagagcgagactctgtctcaaaaaaacaaaacaaaacaaaatcaaaaacaaacaacccatgccccttccctgacttagtggagtaagttcctggaaagaaagcagtacttggggtcaggaatgaagctcctttccagcccttctcttcctaggtgtcaggatcctccgggacagcaattctcaaatccgtactgtgcacacgaatcacagattagcaggggaccttgttaagatgtagaggactgaggcagggccccagattctgcatttctaactagtcataggtagtagagctgaagagcacactttcagttggagcaccgggcgcagtgactcatggctgtaatcccagcaccttgggaggccaaaatgggtgggttgtttaagcccaggagtttgagacctgcctgcgcaacatctagaaaccctgtctctacaaaaaaatacaggcatagcggcacatgcctgtagtcccagctactcagaaggctgaggtaggagatcacctgagccggcaaaagttggaggctgcagtaagctgtgattacaccattgcactccagcctgggtgacaggcaaaaaaaaaaaaaaaaaaaaaaaagattcctggaacacgactctccggggtgaagaaaggagtctgcagttttaataagtcccctgggtaaccctgatgcataatcaggaattaagaaatattgacattagaacttctaggtgataccacaagtttatcccagtagtacaagggtcctgctggccccctaagtaggcaagtgtcacaggtccaatgaggcagtgcaggtcagataggtgcgaaaatgccagcactgttctattttatcagctcattggtgggtacatattaatagttgttcaatttattttctttaaactatatatattcgtgatatacacttttgagtatgagatataaacttatatttttaaagatgtatagagtaatagaatgagttggggaaaggggtaaaaagaactggatttaaaacttacttctgccatcaacttgggacaagtcactttttaacaacaaatggaaataaaaataacccttgctttctttttacaggactgtaggaactggcataccaaaaagagaacagacttgaaagcttgggtcccagctcttccactgcctctctgagcctcagtttcttcatctgcccactgggaataatagttctggcccctcctctccccagagggctcttggaggctgacaggagaacaggtgtgaaagtgcttaggagactgcacagtgaaatttggcccagcactggcgttaccctgatggcatctccagtcactcagtggcacttctcacttgtagcctgatactgtcagacctctcttcatagatgtgtgttttctctccctcactagacgatgagttcagagggcagggtccctgcctctctgtgttttgttcactgtgcccagtatgataccagtcacacaaagacagcagtatgctggggtggacccagagcttgccttatagttgcacggaccaacagaggggtctggttccacctaactcactggctgtgtggcaccttcccagctctcaagtactcacttgtaacaccgttgtgaggaacagaaatatgtaattatggtggagaacctagctcagcacctggcctcaggagggctgcaataaccgttctgtaagtggcagcttggaagtgcttttgtaaagcacatgctacacagagtgacaaggaagtctgtccagttccccacgcagctccgaccttgaccaccacacccagccctgggaaaggagttcgtgccacaccagaaggttcgtgaccactgggtcgtcacccatacatccccctgacttaggggcatgtgagatgccacatccctcccttcccatgccctccttctcccaccccctccactcaccttgtcggacccaggacacaaaaggggtggggtcagctgaggccacacattccatcaccacactctggccagacaccactgtggtgttctctggggctgccacaatgaccacgtcctgccccctggtggacgccagggaccctggcgagaagacagaccagcaggcagccttaccattaggcatttgccatgcgatacctcacctgagtctcacagtaacctggtgaggtggtaccggggacagcagcaatgattccatctgtcagatgggggacgtagccataaaattcagcagggctgggactggacctctgagctgtttcttttagagccagaagaattgcctaggcttcaactcagcaccagagaaatgattagacagacccacacctacctccattcttccctcccaaatgcaacccaccatctaggcagaggactgtcagggtcatgggcaaagcaccagacttggagtcaacagttatagtttctagttccagcactgccattaacgcactgggtgacctttggcaaatcccttctccaaaaggccttggatttcccagtggaaaaggcagacagtgggcttgagtttctgcctgtgcggcagttccctaaaccctgatttcctgccaagttctttgtgtgaccctggccccctgggtggagtggtgaatatctggattgtccagcaggtggaggcagataccccttgaacagaagaaagacgacaccagactgggagcagcctaccagctaagcccagaaggaacaggatggggacggggtgggagtgcagagagtgggtgggaggtgggagggatgcatggcaaagggaagcaagggaggtgcccctgggggaggcttgaagtgagatctgttgagcacctgccaggtgccaggcactttccattcttatctcaaggactcttcgagcctctctgagctgggcatttgataaggagcccagggtcatgcagatggtgagcagagaaggcaggattcaaaccaggtctttccaaccccaaagactgtgcccttcctaatccatcacactggggcaagagcttttcaaagaaacgagtaaaggataagagcactaggccacaggtagccagatttgcaaggcacagaaagcagagagggacgaacccccagtgcctggacccctcagtgactatagaagggcaggagagaaaggggcagggagcagggcttccgggcactgacaccgcctcagatgcctcgcatccccacctctgtccccagccttcgacactgcatccaaccagagggcacacaggctctgcatgaagagaggagccctgcccttggagtctggggtcttgtgttccagcccagttctttcttctctggtttgctgggtggcagtaccctctctgggcttcatcgcctcaccagtcaatgggactaacatttatcacctacttgaaggcaaggcctggaccccttgaggtccctcccagctctgaggtggctggttccagaaacccccaggtttccccacccagccagcccccttacctctgtgggccacactgagtagggcctcctggctgaagtgctggcgagctgagttggtggccacgcagcggtaggggcctgcatcactctcctgaacatccaggatctgaaggacgccgttgggaagcacgatgagccttgggaagaggggagcaggcaactgtgaggtgggcaggggggccacagggagggtggctcatggtaagataaatgcaaattaaaactctaagataccaggctgggcgcagtggctcacgcctataatcccagcactttgggaggcgaggcgggcgaatcacatgaggtcgggagttcgagaccagcctgaccaacatggagaaaccccgtctctactaaaaatacaaaattagccgggcgtagtggtgcatgcctgtaatcccagctactccggaggctgaggcaggagaatcgcttgaacccgggaggcggaggttgcggtgagccaagattgcaccattgcactccagcctgggcgacaacagcaaaactccatctcaaacaaacaaacaaaaactctaagacaccattttcacctattagattggtgaaaatcagaaggcttaataacactccgtgtggatgagggaatggaggaaggcactcctgcctcgatggtggccctgcccatacaccatctgtccagggcaagttggtgatatctcaacatcaaaacttctagggctctatcccacagatactctcagatgtgtgcacaagagcatgtgttaaacgatattcactccagcactgtctgtgatagcaaaaggctggaaacaacccaagtgttcatctgcagggtgggaactggctaaatttgtttgggtacattcgcacaatggaatgttaggcagctgctaaaaaggaggcagctctgtgtgtgctgatagagggccatctccaaatgtgttctggtacaaaacaatatgtttggggacatgtaggcttctgtgcttgcgtatacattcaatgttcctggtaacagtggttgtctctggggaggggacctgggatccaggggactgagggtgggagggactgactttttattatatatccttgtatacagttggaattttatttaccccttgcccatactaccttctccctcccttaataaaatactctttattcacactatctcatgtgacccttaaaacaagcccaagacatagaggaggtcacaacctccattttactggtgaaaaataggagggtattttcccaggatctcacaggtggagcagagtgaaaactcgaacccaagtcttctggtgccaaatgtcatatttgtcctacctgcctgtctcggcagccattggatggctgagaatgcccttggagaggacgtggtctccaagcagacccagccaacacgtatgttacttagaaggggcatgatggatgagggtgttccctgccctctgggctaaagaaatagaaaggtccagagaccttacttgagaaacgatgtaatctgggatagggaggtctccatgggggttggggtggtggagaccagagtgggctccgacctaaggagggggtgaatgggtccctcggaatcctccaactgggatccctacagggtcagctccaggttgagaatcctagtttctcaacagagcaaatggtgctggcctctgggatgtaggctgggccaaggtcagagagggaagggggcagttgtgcgcttggtggagatcccttagctcctggggaagtggggtctaaaaaaatctaaacatggaacaggagaagtagttcaaaggctggggaggaagaatgttctaaacaggggccctacaaacctgctgtggcccaaagacttaaaggacttagagaaaaaaagcataaatatgccctgctctttcctgcatcacacaggcaaacccacctctgcccccagcctctcaccctcagctccaacagctgcctacataagtgctggggcagagcgagagaaagggacagggagacaagtgtggctggagcaaaatcctgggccaggacccagtctgctgccagagaagaactgacaggaaaggacgaattggggaaggacaagtaggacccacctagaaaacaggccccacccccatccatctaacgtgctcttcctccaagacctttctttctcctcttttcctccctcgaactagcgagctgactatgctgctgggaactgcctacatttcctaaccccagtgtttctaggtctttccagggaatattgtgctccaagtactcaagaggtagtctctcctttgaaaaaataacattcccttaatgatgtgattgagtgaatgaatgaatgaatgaacaaattaatgaatgaatgaattcctttccccagatatggtgctattgctgcagccaatagaggcaagatggaaccacttttagggttcatctaaaatcttttctggccgggctttttgggaggcagaggcaggaggattgcttgaggccaggagttggagaccagcctgggcaacatggcaaaacccagtctctacaaaaaatacaaaaattagccaaggcatggtggtgcacatctgtagttccagctattcaggaggctgaagtggggagattgcttgagaccgggaggtagaggctgcagtgagcagtgattgtgccaccgcactccaacctgggtggcagagtgagtccctgactcaaaaaaatcttttgctttgctaaaatgtgtttttagaagctctgtccttggaaaagtgttcaaaatatattagttagtgggggggggggagtaaaaaaacagtgtttatgaagaaattctacttttagaaaatagagaaaagttatattaggatatacatagaaaaagccacaggtggcaaagctcgtgtggtttatgggggttttctgtaggagtgagattacgggggattcttatttattgtgcctgttaagtgggttttttttttttgcaattaatatgtatcagttaggaaatataaaaatttttaaatgtaaattgctaataatctgtgcccttgtacactttggtttgtaacttgggctctaacacagaagcactgtgacatgctggagagaactggtttcaatgtatgtgattttagcaagtgacattctgtatctgggccacagttttctcatttgaaaaatgggttaaataattcctgtcctgccttcttcacaaccctgaccctcttattgtgttttgagctcacattagataacggacataaacatatttatgaattgcaagctctgaacacatgtttacaatggtgtaacccatatacgtatttcaaaagactgcaaggagacgctcaaattggtaaaagctgtgttcagtcagtaggtgacttttttcccctttctgtaaagttggtatactctaccattttaagagaaattcaaatttcaaataaaataaaagctacttataaaatgaaaaacaatctcaactcgaaaggaagggatgattctttttccagcctcaaacctgagtctgctgctcctacccacaaaaggccacttgggccccgaggattaaagaacacagaagaaatgacgcagctgctctgaatttcccaagggccaaggagcccccaccctaagcccttgagatccacccagggcaaggggatactggctggaagtcacatgagattgacagaaatggtaaccactgggagagggtagggccggagcccatgttatttaagtcccttagttccatgtttcttaaaatgtgagtgaatggcgataacaaaatgatttcaagtggatccagatacatggctttttatcctagaagttacattatttatttttatggctatcttctatttatggcaagtgttgctggttttccattttattgcagtgagataatgttcccttttaaaatgtgttcaagttacgaaagagcgagttgatgtaaagaaaattatgaagtggttgtgtaaatggtataagtatggtcacaattatgaaggtggtttttgaatacctgggatttgggaaacattgctctcattgattactagttcccatgaaagaaaaattatcccctagattatcccctattattagaaaatagtatgagtaccggggatttgccttggggtctagtctttaccatcagttccaaacgaagcacatacaccctgacgcagtgtgtttattaactgcacatgtgccacgttacaccaaggcatacggtctccttcaaaccactgggctgagtttatgaatagcatatttgtgcatgcactatatctgggcatgtgtaaaaatacataccttgggcataatcaagttgctgttttagacatttctttattccccccacacaatgtgccgggacatgcgagcctagcttatttatagatgaggatcacttttcagaggacttgggggcaaacactcccagagtccaaaaactggcagctctggcctcctgggttaggtttgtggcttcacgggatgacgcctgagctagacgttgggggtggtggggaggtctgaaacccactggtgtgctgagaagctttggggaagtaacttctctgctcccagccacagttggactacagatttctaaatccaccattaattttttaaaaaattaaagttgtaatgtgatacaaacttcttcagacctcacaggttccgcacccagccaccaaatgacacctaccagaggcctgtgtatcctccacgcaggtcgctggagtctgacactctgagtactaagctgtgtgacctggggcaagttatttctgcctctgatcctccaatccctcatttaacaatccagataaaaatacctaccatatccatatgtacagacctggaaggatgtttatcaagtggtaagtgaaaaaaaaattaaaattgcaacataatcccatttttgtttttgaaaaaaaaaaaagatgattcaacaaaaaacctagtatgtacaatataatttattattattattattattctgagacggagtcttcctctgtcacccaggctggagtgcaatggtgtgatcttggcttactgcaacctctaccttctgggttcaagcgattctcctgcctcagcctcctgagtagctgggtttataggcgcctgccaccatgtccagctaatttttgtaattttggtacagacggggtttcaccatgttggccaggctggtcttgaactcctgacctcagatgatccacctacctcagccccccaaagtgctgggattacaggcgtgagccactgcacctggcctaagttttgtattttcattccagcctgggtgacaggtgaagtggctcaattttggctcactgcaagctccacctcccgggttcaagtgattctcctgcctcagcctcctgagtagctgggattacaggcatgcgtcaccacgcctggataatttttgtattttttttttttttagtagagatagggtttcaccatgttggtcaggctggtctcgaactcctgaccttgtgatccgcccgcctcagcctcccaaagtgctgggattacaggcgtgagccaccgcgcccggcctaagttttgtattttttgagagatgacatttcaccatattgcccaggttggtctctaactcctgagctcaagcgatccgcccgccttggctcccaaagtgttgggagtacaggcgtgagtcaccgcgcccagccatattgatatgaattttaaaaatgcatctgctggaatatcaattaaaagtaaatagaggaaaatgtgaaaataagaaatacctacattaaaggatgattggaagggttaagtgagaaaacatgtaaaaggctcagcacgtgcctggcccaaggtacactcccattaagtggttcatgttgtgactttcaacatggggagattttgctgccttctgctaccctctctggggggcatcaggagtaggctctcgcgtggttctctcctgcctagctcatctgttctgggttcatggaactcccaggaggcacccatcatcacacagtggtgacaggctccacatttagaaaggcacagaacttcaaatgtcagtgttagaaaggctgggtcagcatttcccagggttcaccctctagaatgctcattcatgggatgttaaggggctcctgggcaaacgagcctaggaagtgcttcgttaaacaaggtcaacaggattctcgatacagcacttctcagggccttgccaactccaggagggagatttacaggcagtttcctgttcttatttgatcatagaatacttcattcaagaagcatttaaagggactaacattctataaaggccacgctttgggaaaccacaatctaaatcaattttcatttgtttccccctttcattttataggtgggaaggagaatagactgggtgagaagtgactctctgaggaccagtggggctaacccatcaccaaagtcaacaggatgtctctctctttttttttttttttttttgagacagggtctcggtgtgtcacccaggctggctggaatgcagtggcattattccagctcactgtagcctgaacctccaagtgatctcgctcagccttccaagtagcggggaccacaggcaccacactgccacactgggctaatttttgtattgttttatagaaactgggttttgatattttgcataggctggtcttgaactcctgggctcaagtgatcctcctgcttcgtcctcccaaaaggttgggattacaggcatgagtcaccacacccagccaggatctcttatgtatggacctctcaccctcttcctccctcacaactgtcctgtggcttttctaccccgaagtttctcctacaacccccatccttacctacacatgggcaaaagtcagaggagctgggacaatgcaacacaggcaacagaaggttggatccaggggagaaagggcagtgtttcagagcccaaggagccccacctccaccaggacgggagaaggatctagctggtaactacagctaccgagatatagggagaggactgcagggtggctgggaaaggccttggagccacatttccaaagatacgtaagaatccagggggtgatgactgagtcatgagaccaactcagagaccacagatgcaaatgagccttgtggtttctggtacgctgcatacacatctggacctacccaggaagccacaagagggaccaagtccaaggtctagcctctgcttcccttccgccttggaaactcttccctgggattgctctacccatccattgcctttacagggaaagaggagagtgaaagaggaaagacctctacaattcacttctcagagggctacgccccactggatggaattgagagaggaagagaagttatgcatctagagtggaaactccggaggaaccctgaaaagagaaaaccttcccagcagcctcggggagccctcaacagacaaccaacattctgccaatggctcatggtacggcttgggataagccacagctcctctctggccttcagtctccacaataaagcaagtggttggactagatgtgctgggaaggactctactactacacctacccaggctccacagctcaatgggtggcttcctcccagggagcaaaaacttcttgtccaacttctctttgggactagacatgagccaggagtcaggcggtggttaacactcaagtcagcttaggtaaatgcagctacctcgactctaagaatctcagttctgagcacaccccagagccctctctgccctgcctaccaggacccgctcccctacagggcactcaccgaggctcctcaggcaatgtcacctggtccttctcccaagtaatgatgggagctggcagcccttcaatgtggcactcaaagcgagctgtcccgttctcctccaccgtctgagactccgggtgcagagagaagtctgcgagtgctggggacagtgagacacaggcagggacgggaaaagaataggagagagaagccacagcaagcacaaacagtgaaacacatccgcatggagacacagaaacacacagtcacagaaacacacagcagagccaattcagaccgagggagacacaacaagaagtggtgattagcggtcagatactgccagcagaatgaattccaaagcccccctgcccaacatcatcatgatggtcaaactatacagtaagatgcacacttcttctggcctgaaagttacttcatggtgatctgtgcctcctgagagccccctaaggggtaaggctggagcgtggggtttggctccacatgttccacctgccgtgcaggcaggagctcccttaggaggcagctttgtgcctctgacacaaagggggcactctggcaggctccctggaggacagcacaagcccagactctaggactcaaagggaaagaaaagcagaaggaacaggggagtggagaagaagcgggaagattatggaatacccaagaatgaggatagacaataccaggaagagacctattgagcaggatgggaggcagggaaagggggagtgggatcaagagagaggcatttgtgcaagtaactaactgcagatcccacttcgcacaccccaagtctgggtttcagcctcagacccccgcccgatgcaagcacttactggcaagcttgacgacagcagtctggctggccagcactccgagggggccgtgggctaggcacgaatagttgccttcaatgacccccacagcctcagggactgactcgtcactgccattgggtgctagtggctgggacagccacagggaaccattgggcagcaggtgtaagtggtcgtgctccagcagggtgtccccatccttgctccaggtcaccctggtggggggtccagcggcagcagcccccaggctacagtttagcactgcagcctgctctgggcccaggatcacttgcagtggccccactccacagctcagctccacagtcgtctcctggggcaacagcagctcccctgcatagaggaggagcacggggccatcagtgtatgtccccccacctcccacagcctctgctcctgagtcacccatgcaggggctggggcaaatcaaggagaaacacctgcatctggatcctggctctccccttactaactgtgaccttggacaaactgctgcattcctctgtgcctgtcttcccctgctgctcaatttcctcatagcagcattattcataatagccaatgagtggaaacaacccaaaagcccatcacctgatgaatggatagattactcagccatcaaaaagaatgaaggactgatgcatgctacaaggtagcaagaaaacttgacgctaagtgaaggaagccaatcataagatgccacattttgcatgatctcatttctacgaaatgcccagaggaggcaaatccataaagacagaaagtggattaatgattgtcagtgactgggaggaggaaggacagagagtgactgctaatgagtacagggtttcttttgggggtgatgaaaatgttctagaattagatagtggctgtggttgcacaacgttgtgaatatgaatatactaaaaaccactgagttgaacactgtaaagggtgaattttgtagtacgtgaattgtctctcaattaaaaaagcataccagcctgggtaacacagagagactccgtctctacagataatttaaaaagttagctgtacatggtggcacaggcctgtggtcccagctactcaggaggctgaagcaaggaggatcgcctgagcctagaagttccaggctacagtgagccacgatcacgacactgcactccagcctggctggcagaacgagactctgtgagaaaagaatatagtggctgggtgcagtggctcacacctgtaatcccagcactttgggaggccgaggcaggtggatcatgatgtcaggagttcaagaccagcctgaccaacatggtgaaaccccgtctctactaaaaatacaaaaattagccaggcgtggtggcacgcacctgtaatctcagctactcaggaggctgaggcaggagaatctcttgaacacaggaggtggagattgcagtgagccgagatcgccccattgcactccagcctgggtgacagaatgagattccatctcaaaaaaaaaaaaaaaaaaaaaaaaaaagcacagtgcctgacacagaatgggagctcagtaatgtcattccctaccctggaacctaacagatcatattgatcattattacccaatcaaaaatatgccactggaggccaggcatggcagctcactcctgtaatcccaacactttgtgaggttgagggccaagacagcaggattgcttaagcccaggagtttgaaaccagcctgggtaacacagggagacctcatcattataaaaaaaaatttttttaattagccagctgtggtgggaggatcccttgagcccagaaggtcgaggctgaagtgagctgtgattgcaccactgcactctagcctgggtaacagagtgagatcctgtctaaaatacatacatatacatatatagatctctctctctctctctctctgtacacacacacacacacacacacaggctagaaaaataccatatccaagaaacatttaaaatgtattataagtgtgagaaaatgtgtgtgtgtgtgtgtgtgtgtgtgtgtgtgtgtgaatactatatattttgaatgaacaaaacaaaaataagtcccagctgtttgggggagccacctggatgaaggaaagtcagacattcccccttccccaacaatgaactaagtgagcagatcctgctgggaattgttaagtgccccaggtagggactagactcaagctggattcagacccagcatgagaggaggctcacatggctcattccaggccctggcagcccacagcctggtctgtactggtgactggagaagctcaacactccctgcagctaatttccccaaggccatgcaggaggccagagccaggactcaggtctcctgactcaatccagggttcttttttctcccaaggccccagaggaacctacagaccccaacactgcccttgccacaaagggaagagtagggaaacagtagaggaagggaatgccatcccagggtcaaggcaaaaacacacaaaagccaatgtttattattggaaccaatgttctgcagggcccagccaccattattcatagacaaatggttggttctccctgttgtgtcttccagaaggttgacctgctgcctccttgtcttataaaagctcaatggcccaaggtcccttcttaggctctggtctgactccttactttaaggcagaatggcatgtctgagaggaaccagggccagaggtcaggacaatggcccatactcatcacaaggcaggtctgggctgacagagccacgtggggacgtgcacaaaacaatggcgagggaatcaggagaccctcggttctagatccagctccatcacagtctagccatgtggttttggcccagtcatttccccttctgggccccagctcactggaatgtagcaggtgacctctgagatgctatgattctatgattattcacgacatggacacacctattcctgaacaaacataaaacaccattgagaccacacacaaattggtaaacatagctctgcactcctaaacacatgcgcctcagtctctgccacactcatcaacacttggacacacaggtcaacatttagaagccctgtgagtctccagactcccttcccaccagctccaaagaggaacaagagtgaggggagaagagcagtgatggctgcgtgaaataaggaggccagggcctgggattgcagtgtgaagggcggacggagagacaggacctgacctgggctgctgcctttcttaattcatcagatggtttctgctggacacctctggcttcacaactagtctcagcagtactcgcgggctcagcagggagaagcagcccctgccctcaccaagtttgcattctagttggggaaaccaatctggcattcacactactgcgggccacgtgctgtggtggaaacagcttttgaccttggggaagaagatcaaggtttcagtcttgctgctccacctaccagctctgtgacaagccacttaacttttctgggactcagtttccacatgaagatgataccactaagcgtgaaggaattaaacaagacaatgtatgtcagggctacagcccagagcctaatagacatcactcaaggaatgggagcttattctttgtttgtttgttcttgcgacagttgtgctctgttgcccaggctggagtacagtgacatgatctcagctcactgcaacctccacctcctgggttcatatgattctccagcctcagcctcctatgtagctgggattacaggcatgcgccatcacacctgactaatttttgtattcttagtagagacagggtttcaccattttggccaggctggtcttgaactgctgacctcaagtgatctgcctgccttggctctggaagatcacgccttggctctggaagatccagtgctctggaagagcacatccaaagtgctggaattacaggcatgagctaccatgcccggcggggagcttattctttaaaggcactttgtaactataaagggctgtacaagtgctatttgctgttcttatcatccagtcccttctatctctaaggccctagatgccatgattcaagtacagggtaggaggaaggcaagcccggctctcagtccagtggcttccaaatgcccattccagccactaagcagtaggtttgggtttcaggggagaaaacccccaaaggacacaaatccctgagccctccggcagcctccctgccccctaaagcatgtcccaggcttggaaaatcccctgctgcgttgaacaaacaatgtgaacagttggggcccgagcagctgctgggtatgtcagcagcctgggctctggcaggcaggacggccgccagaggggctggcggctggctggggagcccagaggaggctccgattcccttcctgaatattcatggatcagcagatgtctggcttccccacctctgaggagctcagcaaggcaggaacagggaaagcaacaggaacgtagacacagagagaagacggggtccccctcagagagcagcagtgctgtgccaggagcccaagacagcccattttagtggaaacgtctgtgaagcctgagaatcctcattccacagatggggaaactgaggcctggggaggggtctcatctctgtggaagacagtctgggaaaactgcccttctttgactttttggggatgaaccagcattgaggagacaactgctcctgaataagagggttctctctgcctctgtgctcaacctgatttctgtgcccaggaagcgcatccttagggactcacgtgccagcccttctgtgaggctgctcctaccttccccaggtaaagtttttcctaagtctcacactgaaaaccacttgcaggtcccttactcttgcctagacagacaagggggtgtggtgggacaagcctggcctcagagtcctgggttctaagtccagtcattcattgcatgaccttgtgtgagctacttttgtcctttcagcctcagtttccccaattttaaaatgagaagtctccaaacttctcaaacgttttcacccaaattctctcaacagcagaggaacacatatttacgaggctcgctgactgcctaaaatgttttgactttttttttttttttttttttttttgagactcgctctgtcacccaggctggagtgtagtggcgcaatctcggctcactgcaagctccgcctcccgggttcgagacattctcctgcctcagcctcccgagtagctgggactgcaggcgcccgccaccatacccagctaattttttgtatttttagtagagacggggtttcaccgtgttagccaggatggtctcaatctcctgacttcgtgatccgcccgcctcggccttccaaagtgctgggattacaggcatgagccaccgcgcccggccaaacctctagcacattttgcattctgctccataacacagcaatatttgttttaatataagtgtggctcccataccaccaaatcttttcataaaagcgatgctctggggaggggaccttatttgtccaggagcttcatggccagcgcttacttgccacccccagcccactgtcatggctgacccccaacatttttagccctccctctcagtgccggggtggacacattgcaggtgcccagtggacacttgctgcccgctggctttctgtcttgagggggccacccctcccataatcccttctcctcaatctcctcagtgagaccctgtcagagacacagagctgctgcatttgggaaccctagggccacctctcaatctcctttttctgacagattattttacccacttacaggataaactggattttatgaggccaattagaacccagacagaaaggagattcgctgctgagctccagggccagctcaatgctgtttcgtgggattagtggaggcctggcgtgagttccatttttcagtgaattcttagggaaggggcgtgtagctgggggaggggaacaacgaggccaagatggctcctttattaagccaggaacttgccacaaacatcacatcagtgcctcctcacttctgaatttcagggcccaacagatttactacttgtttgcagcccaggagaaattctccacgacaccatcaccattctcctttcccagagaacacaagtcggttccttccagaaaccttccttcctgcccccaaccttggccacctcccttaccacatgctgagcccctccccccaacagctggaaggagagttgggacagttgcctgggacacaaggaaggcctcagctctcccttcatctgcaatcctgaggggagagtctcagcctcagcctatccaacagcaaagccaggctcagcttgacctgcctatctcccgctcccctgagaccctctacccctccacacacagcaaaccatggccaattctctgaaaacacatcttgttccacgcattgctggtgctgctctcactccctagaacagctgtgatgtccctggttgatttagacacctctcctttttctgccccgtagaacgctggcacccccatcatcgcagttatcactccagattttttttgcggggggagacggagtctcactctgtcacccaggttggagtgcagtggcatgatctcggctcactgcaacctctgccacccaggttcaagtgattctcctgcttcagcctcttaagtagctgggactacaggtgtgcgccaccatgcctggctagtttttgtattttttggtaggacgggatttcaccatgttggtcagggtggtctcgaactcctgacctcaagtgatccgcccaccttggcctcccaaagtgctgggattacaggagtgagccaccatgcccagccttcactctaggtttttgacttgcctttctcctcaactaggcaccaaagtcttggggttatgtcttagctttctaaatcctcggtacctggaacagtgcctaacacacagtaggtgctcaataaacatttcttgaatggatgagtgaacccatgaagacatcctcaaaaagataaggcatagagccccctatgcttttccaagcatcagtttccttatctgtaaaaacaacagtaactcccttcagggcaagaaaggatgtcaggaagacatgtggaaactgcctagcacactgcgtggcacccagtagacatgacatgcttgaaaagcagagatagaacagctgaagtccacactgaaagaaaccctgtacttaaacatgaccaggctggggagatcactaccttgcctgttctcttgctgtatggctcatatggttaaaaaatttatttctcttgtgcccacctgtctctcccagtactttctgctcactggccagagctttgtcctgcaaactatctaacaaggtcataagtcccttatagaaccatccaggagtcttgggtctgcacctgaaggacagcttattggtccttgcttccctgatcccaaggaccccatgggcccccaaatccaaaggatacctcactcagcctcagcagtgaggcagtagtagctggcagcccagttggcacaggtaacagggtttgatttctctgcatgtcaggctccaaaacatactctctggttttccttccctggccccctagctcctgtcacccacctctgaccaggctggggtcctctccctcagagccatgcttactcctccccctgcccccaagcctgcctggtaatgacatctgctctgcatctggaattccgtatcaagtctggttgctgtaccatgggagagaatagaaagaggtggggggggttaagtggaggagggtggattccagagcccagatagacccacttgagagggagagcatgaagctgataacgtctcagaaggtatagaggagtgcaaagagagtgaacttgggtatccctagaaagggtggccccatttcagtccctaatcatgtaactttgggaagtcactcagttttctcatctgtaaaaacaggttcatgctaaaattgtttcttcttttctttctctttcttcttttgagacagagtctcactctgttgcccagggtggagaacagtggtgcgagccatcatagcttaccacagtcttgaactcctgggctcaagcaatcctcccacttcggcctcctgagcagcaaggacaacagggaacaccaccatgaccgccatgctttttttttttttttttttaatttttcgtagaaatgaggtctcaatatgttgcccagtctggtctcaaactcagctcaagcgatcctcctgcctcagccacacaaagtgctgggattacaggtatgagcctggcctgaaattatttctaagttcctctcagtgctgacattcaatgatgcgctaattgtgaaattgcttcacttgaaagagatatgtttaggagaaaagaaatgctaattaacatgtaaatgtgtgtttaattgagtcatgaaagcacatagaggatcaatgaaggtttaggtatcttctggataagattcattattaaaagaaactccaactgtttgacctgattcctaacttccaagatggggaaagaggcccaccccaaatgactgagattggcctctgagcctctgggctgagaaagggatgggggaggtgaggagttcccaggtgaggagaaagctctcaagttcttagaggcctcccattactgacctctaggttccctaccctccaaattctgacttgggaagaagggagagccgagagccccacctttgtgcgtgtgataagaacagagctcggcttctcgccacctgttcacaaaggggtcccagtccctgactcaagaacagtgttgggaggagatgggcaggcacaggcattatcctaaccccaataccagcccttcattctgcctcatgtttttttgttgttgttgtgtttgtttttttgagacagagtctcactttgtcgcccaggctggagtgcagtggcgtgatctcagctcactgcaaccttcacctcccaggttcaaacgattctcgagtctcagactcccgagtagctgggattacaggcatgcaccaccacacctggccaacttttgtatttttagtagagatggggtttcaccatgttggccaggctggtgttgaactcctgacttcacgtgatccgcccgccttggcctcccaaagtgctgggattacaggcgtgagccaccgcacccggcctatttcttactttcctctctctcgccccctacaaattcaatctatcctcaagttctactgattctatttcctgaaaatctctggaatgcagccactccagcccaaccccaactgccactatgctagctgccaccatcctctcttctggattgctacaacagcctcgaaggagctggagcttcctgcctccagccccacccaatccatcctccacactggctggaatgagatgatgcaaagctgattttaaatcctgtcaagggctcatggggactctcaggccagaaaccttggtgggccctgtaaagccctttgtgagctggatctagctcccctcttcagcctcctgtcttgatactccctgacccctttccatgcttccctcacctgccccccatccaccccttgtccctaaactccagctagatttagtttaatccaatgatctcaactaaatcacctctgaactttgcacatgctgttctctggaaaactgtccccatcatcattctccttctacagggctaactccatgtcgagctctactactcatcactttcttcaggaagcttttgctgaccttcccagatcggtgtaggagcccctccttcctgcgtcttccccagcacttcaggggacttgtcagtttccccctccaccagactgaaagctttgcaccagggatcaggtctgcctccttatttactatattctaggcactaggcacaagctagcctataaaaggtgctccataaatatttgttgaacgaatgaatgacctcagtacagatcagggtggctagtcatgactcgactggagtgtcccccggcctgctgagatttggaggaccagggcaagctgttgtagccactcacactgcaaccaagagacgccgcaactcggtccctcgcctgctttgtgcgttcgggagcagggagaggccagggaagctgggtccctcgcggcaggtcctaaaggtattgaataatgcgccggtgcggttcccagccctgatgccgtttagctgggtgaccctgagctcgttccaggagccctaggaatagcggaaggtggggcaggggaactattccttaatcccctgagctctgggaagacagacctctctctgacacttccccgcccctttcacctgacaagccagggcctccagctcctctggcccagcagccgagacccagcctcgcggcggcctccagcttaatccgctgttggggctggaaaggggcgtgtctttgtagggacagaaggggtccgaggagttcccggcactttcccacccgctgtttggttttcctggagatgggcctggggctggccaggcggaggctccttccccccgcctccctcccacgtggcctggctgagtctctctggaaagccgcagcagctggagagaaatccccctccccacccccacctccaagtccctccccgactctccccggacacatcctcagctcccccctccgcggggaaggcaagaactaggcgaacaaagcggccagcccatccccctcccagccctgccacctacactccccatgagccgcccccaaacgcacaccggacaggaagcgacagagctgtgggtggaagccgcagccctagacacacacccttggggacttcgctatcccctccccagccctttctccagcttggacaactctgacttaccccgtacccactccgcactgggctgcggactggatgaggccctgctgacctcgtccacgcttccctggtcggtccctggggggtggggccggggtgacacgcgtcccatcgtgagaacaagcgctggacatgtccacgaaagcaaatggtttcctgccccctcccccagtccactgctggccacaggttttggggagcaacacctccctctacccctctctaaccggccccagggaccacacccactgggcaaagttgagtgttgttttatcaccaccacccccagtcaaacgggatccatcgctctgtcccccactatgggcaaggacacttcccaaatgccaaggccaaatattagctcagccccataaacacaattgcacacgcacccgacccaaatggaggtgcagacacaaccccagttccctcctcttttacacacactctcaacccaagacacgcgcaggcaaggcagagcccgccccgcgaaagccaccgacaccgcagctacccgccccgccgatgccacgccgcgaccatggcacgcactgcggacacgacaggagcactcccaacacacacacacacacacacacacacacacacacacacgactccagactctgcgaaccaaaggcacacacccactgcggacaagcacgccccacaaacgccccccggccgcagctcgcagacccccgcgcaggcatcgcgggcacctggacgcgcagcccccgcacttgctcgggactccggcttgagccagccccgcagcccgatgcagaccagggcgcgggcgcaccagcactccgcagtcgctcctgcctctccgggcgcccgcccttaccgcgcgcggccaacaggcagaaggtcaacgcgaggagcccgcggccgcggccggcgtccccccgcgccatggggctgggctcgggccgccgccgccgccgccgcctccccgtgcttcggccgccgccgcggggggagagcgcgccgggcgtcagtggcccggggaggcgcggcgccgcgggcgggggcgcggcctcgggggcccgggcccgagctggggccggcgcgggggccagggccgctgccgcctcacccgcccctccatcgccatcttgggcgagcggcccgggagggggcgcccggcgagtgtggccaccctggccccgccggggaccctgcgcccgcgcgccacggccctgcgcctcgcgggggctcctctcggcccgggtctgtgtcccggtgcctcgccctctccgggtcgccgcgggcccccgtgaggccgcctgttgctgggtctgtctcttagtctccccgtctctgagtcttctggtctctctgcctcagcgtctctatttcttctccctgttgctgcctcggggtctccacctccgttccaggctcaggggaggcagattcagggccacggtctttgtccagatggcccccttgccacccgagcccagtccattccagcccaggtcctggcctgaatgctggttcgcttctccacacgttgcgccagcccacctgcggagatcttgatagtcctatctgccatcccaaaccaagggcttctcttggcctccttcccttgctctggcagtaactaacacaggcaggacacttttacactaccttcaagcactaccatattcagatgtcgccgcatggggaaactgaggctggagaaggtgaagtgacttgcccaaggacaggaggctagggagcagcagatacaggacctgaaccttggttttctgacttcggaaggtcatctccactccctcaccctgcctctgctgtccagcatttactgaagtaccctttttctcattcttcaacggtactttctctaacctacctagccagactgtttgcctcagtatcccgcaaatatttcttgttctacagccaagggttcaattgtcaggctagggtggggaaaagagtacagattcaatgacctagttaaggtcctttccaactccaagatgccatagttcttcccttccctgtgtctctaagtgttcctgtgacttagagccatcttgtctctacacctgtctgttgtcagttaaccctcaataatcactggcgctttgcatatctaacaggcctggcgtttattcattcattgccacgccccatcttcacttgccctatcagcagcatttgacttagtgaatcactccctcttccttgaaacacttgcttcccttagtgatctcatctggtcctcaaggctttaaagagcatctttatgctaatgatgcccaaatgtatactttcagcctagaccatctttcctgaaccctggacttctgtatccagccatccaggccccagttcctttagctgtctagtagacaaactcatcctgatcttttctatcaatctttctcctcccacagtcttcctcatctcagttcctttcctgttgcccaggtcaaaaatgtagaggccaggcttggtggcttacgcctgtaatcccagcactttgggaggccgaggtgggaggatcgcttgaggccaggagttcaagaccaacctggccagcatagcgagacccccatttctattaaaaaaaaatgtagagtcatctcctactcttcatgttcaga

SEQ ID NO: 275 - DNA, 317998 bp, Homo sapiens
  source 1..317998: mol_type = genomic DNA
acaatgaagcttttcaagaaccggggaaacgcgctttccagccgcgctgttgttgttttcaatgaacctctcccagccccgcactccccgcccacccctcccctctcctgcccacccctcccctgcctagcctttccctggctacccacccctgccccgccgagaccggaccggcggcgggggcattgtttttggagtcgggcgggaggggagggcgcgtgcggggtggccggcgcagtgcggtgggggcgggagcgggtgggcacgcgcgcgtgtctctgtgtgcgcgcgggaggcggtggggcgggagatgggggcggcgcctcgcagtctcgcgccccacgcccgggctccgctccgcacgtcttggggaaccgggctccggttttttgcgcgcgccggcctgggccgggccctcggcgcgccgctgctgcggcggtggccgctcgagtgtgcgagcgggcgcgtgtgcgcgggccagggcgcgcgcgcgcgcgcgagcccccagtgtgtggcagcggcggcggcggcgcggcgaggctggggctcttgtttaccagcattaactccgctgagcggaaaaaaaaagggaaaaaacccgaggaggagcgagcgcaccaggcgaactcgagagaggcgggagagcgagagggacgccgccagcgagcctgcccacggccggcgctcgcagaccctcggccccgctccccggatccccccgcgccctccacgcccctcccgcgcgggggcagctccacggcgcgcctcgcctcggctgtgaccttcagcgagccggagcccccgcgcagagcaggcggcggcgggcgggggccgggcgggggccggcgcggggcgggcggcggcgcagagccgggcggcgcggcgggagtgctgagcgcggcgcggccggcccgccgctttgtgtgtgtcctggatttgggaaggagctcgccgcggcggcggcggcgctgagggaggaggcggcggcgagcggagccaggaggaggaggaggagggggagccgctcattcattttgactccgcgtttctgcccctcgccggcctcgcctgtgacccggacttcggggcgatcttgcgaactgcgtcgcgccctcccgcggcggaagctcgggcgtccggccgcctcccgcgcggccagggccgggcttgtttttcctcgcctaggcagatttgggctttgccccctttctttgcagttttccccccttcctgcctctccgggtttgaaaatggaggccgacgacgccgacagcccgccccggcgcgcctcgggttcccgactccgccgagccctgggccgctgctgccggcgctgaggggccgccccgcgccgcccgccccgtccgcgcacccggagggccccggcggcgccgccttcggagtattgtttccttcgcccttgtttttggagggggagcgaagactgagtttgagacttgtttcctttcatttcctttttttcttttcttttcttttttttttttttttttttttttgagaaaggggaatttcatcccaaataaaaggaatgaagtctggctccggaggagggtccccgacctcgctgtgggggctcctgtttctctccgccgcgctctcgctctggccgacgagtggagaaagtgagtatgtgcccgccgcccgcggccactgcgggaacttttcctccgaggggctgcgccctgtttgcgaaacccgagttgccaccgtcgcagctgtcgggcccccgggctcgggagcggcggggtggggcgcagggcggctctgccgggagggaggctgcagcggacccgggacccgggctcgttcgtctggagccccgcgggccctggctccgcgcatccccgcgcgggaagggcttttctctttctccgtcctgacagcccagccgtgtttcccggctaggcgcgaggactcggtagggaagttggtgccggggcgggctccgcggttcccgggccccgcgacccgcacctcgccccttccatgcgcaagagcctctccgcacacagcgctgatcccctgcggcgcgcaggcagcagcgacagcaccctgggccgcaccgcgtctccgctgctggggctgaccgggcagtggggagcgggcagccgcccggcccgcggggtgcgagttgccctcgaggggggaggtgccctgcggagaggccccgaagccccaggacacgtctccaagcgcccgtcgctgcctcccgtcgcccaacgtgcttttgcccctcgggctcctcgggttcctggccttgcccgtcactttggcccgctcctcgttgggttacctgcccccggcgtcccggggctgggcggtggggtgaggggaagcgctctctgggcagccccccgggaagtgcgaggccgggagtcttcctcagcttgtctcttccggggagcgccactgggtccccagttcagagggctctgggatggtctcccagtttctcccgggccgggggatggaggggtactagggccgcatccgagtgtgcgttggtgggtgtgtggtcggagccgacgtgcattccgacacacgtgctcgcagcgcggggtgtagtcgccgcctcacggggacacctagacgcccgtccctggcgagaggtgtcgtacgctgtggtttcagcgccagggtctgcggcggcgcggggagggtgttgtgttttgcgagcgcggagccctggccttggttttgttgtggtcggcgtcgtgtcgccctctcttctgccgccccgcacttcctttgtacgtagttaataagcagtgtcgctccacattcgctgtcttttgcaatctgatagcttttgttttggtggtgtcgggtgggggttagtagggaagcgcggggatgcggggagcgagaactccccccggtgtctacggccggaggaggtgggggttttattcttctgaaaaagttgaaagtgtggcttactggtacattcaagatggtagggtaatttgaacacgattaaaagtttaaatgtcgcagaactgggactgggaacggtgagggcgtgttggtgagtaatggttgccgagggtatgcaggtggtgccgattaactttgaaaaaatcacgactgagccttcacgagtgaggcggggaaggaggaggcagcggaggttgtatggccccatcaccggggcaattcagaaaggctgtttctataaacaaatccttaaacgtctggtaagaaatgagtccgcgacggaacgagagcagatcgtggttcgcgtgtttactgccgagtgggacgcggactggggccggaccttccacagatctgggctctcctgctctttgttttctaaactttcagcggactcgattgggcgaaagccttccggctccctttactaagtcgtttaggtggtggctggggggacaaaggagggtttttatctttaaaagataagtacggtttagaagacacgggagaaataatccattttgttatgttatgcagttgaactgtatagcttctctagttttgtgtttttaatgttctgaaattcaaaacagcagggatggccttcgccgacgcaggagtcgggcattttaaaataggctgtttttcttttggagcgttcttcttgaaggatattctttgtgcaagacggcgatttttgagaacacaggcaggagggagggggtgttttaatgtatgtttttactccatgataccaaagcttccccccaggatccctttacagtggttagttcctggaaacctgatgggtggtcagaaggcaccccaaatctcgattatggtttgctgaagtcttgactgactcagtacctgcccctccctccatctctgaaatgtggagaattaaaagctatgcctgtgaacgggcgttcagtttttagccgggaaggtgctagaccacttaactctgatagaaataagctgctgagccctatcagggagggcgttctttcagctgttgtctggtggagaaataaagacagggtgttggttcagttgcaggtattttgctggcgtattgagagattagagtttcctctttgagtgtgatggcagtagaaagagtgttgtttatcttagaaaacttagtttctgaagcagaggcagtcatatggatgtgtttgttttgtatcaccataatgtgaacagagcatctaaatgaaggcggttcggaggttctgagtgatagccagataatctgagggctattttgtttttaaaaagtcagcatgcactttaaatttattgtacccatctccttaaaaggattcagtcatctttctaccccaggcatcctgttgtcacagaaatgtaggtatgtgaaatgttggtgtttaaagaagttagtgttttattaccagaaggagaacccagaaaaagaacttctgaaagaacctaaacagcaaattatagtttagatcctctggagagacatagcaagcaaatggtgttttgtggaagggtggggtttgtgtcaggatttgaaatgtaaaaggtcataatgtttgatttgtcgaaaaagattagaaaagttcaactctaagaaatatgctaaggttgaatagatgaagcttaaaaatatcacaaaaagtgaaagaagtcagtcacaaaagaccacatatcgtatgatccggtttatgtgaaatgtctagaataaacaaatccatagaggcagaaggtagatgagtggttgccaggggctgggggcggatggaatggggagtgactgctggtgggcacagggtttctttttggggtgatgaaaattgttctaaaattagtttgtggcgatggctgcatagctctaaatatacttaaaaccattggattatgtactttaaatcggggactttaatggtatgtgaattatatctcaataaacccttttttttttttttaaagaaatgtgatcaggttgaaaataacttgttatgctaccttaaattacgttaaaattattacatacatttgacaggctgatgtctctctctcttttcatttatgagtttttcagatccgtgagttgcagcaatacaacaaactgataattgaagcttagcaacagggattcaatcccgcagtagaaatgggcaagcaggagaaaaagaatcttggttctatgtagcttcagttagggattgaggagctggatttaaaaaacacaaatgctggtggagggcagatttttgacaatagaaacctcagctgaatctgaaatgatggtttttttcaggatagagtttaggagctgagtctgaagggctgtttgtatttccagttttattatgttttccaacaaagaaagacattgctgttttaagatgttttaaacactcattttttgatatgccacattgaccacaagtggtagtaaggactgaggatgaacagaacagttcattttaatgcagtattgttgtttcttttctttgcagttttattttatttcttacatagttccagggtctgagcaggagaaagaatctttaggatgcagtagttttaggatacactgtttcaagtatacagtgatttttataaaattaaaattccttacagaacgaaaggttttaaaatgtggcaaaggcatttttgttttgaaactgtgtgcatttatccagatttaccctggcctttcaataggaaaagacctagagaataattgttgtttacatttgcttttggtctttgtctaaggcttagtttactaataaaaatgtttcctgcccttcctattgttgcaagatcagggcagtaatgaaaatcaactgtatcattttcacttgttgccttagagtttttgccaagaggaaccctcaagggacggtggtttccttttaaatctggtttcatttgttttgtaagaatgtgctgtaagaagcaactgaatccagcctgcacttattgtgcacctactgtatgaaagctgaccttgtgctactcagtgcatgaacctgcagagtcttgcatgaaaccacctttcttgaaattcagattttttttcagactcagtatagggtgcagttttcaagtagacagtagttagcattttaaaggttcttttaaaaatatttctgtagacttaggactctagtgttgttcatcagaagcctttaccctataccttttttgcctcattggtgctttccgttatattgggatgtcactgtagactgtgacatacaggtgatgttaacccatcttgactggcggcactgtcttctttataacattggatatggcaattgtgatttacaaactgcagtgttgtagttgcctttttccaaaaattaggagtcacaggtgtgtacatgaacgttgcatagcatgttttgagttgtaagaaagatggaacttatttcagaagttttctggattacatattgcttagttagctttctagaaatcaggaagcattcataatttcagggcattttataatttgtaaataacttggtgtttttaaaagcgtgagggagtaagagtgaggagacaaatcctgaaagtttttgttttttaattgtaaagcatacaagatacatttctttataggttgtgattttccccaatttgttttcaaaactcatttaaaaatcagacctagttcatggaagaggtatttgcgcctgtgggcgaacttgatttgaactgcttttcttagccagcttaggacaggtgctgagtccaggggatgagctcttctcaattgtactaaatatataatagttgcacacatgttacggatatagtttcttgatttccagtctgagatgttctgaaggaaaattctgaacactttagagacaacaaagtgcctaatgagtgatgcactctgatccctcctggaaaatggtgtttggcatcagcttagcaagaggaggttttccagttatttgtaaagatgtgatgtggctttaagtggggatgggggagggtagcagccccagtgtttgtggacattgagacctgttgacatttgggaagcataactgagttccactatttgaaaagattaaaactttgatatatgtacacatcccctcatgcctgcacccccatccccgagggtctggaaaagaattgatttgttctgaggaaggaacatatatttggaatataaaatggttagtaaacaaaggatctttaaaacaagttagattgttatctcaagagaagcatacttcctcggcatgatgttttcttttgttaaattgctttggttttatttgactcaaagtattaacaatacctttgattttgagacttttggacttttgaagactaagtttttaaatggtcaattttactcgtttgaaagtcccagataccatttttgaagatttctctccctttttttccactgatgccggctttacttatgttttattttcaaatcttaaggaaaaactgatatttccttacttgaactgagaaatagtcgttttccctccctcttttcttccacagtaaatacatgttgagtacttactggatgcagttctttaggtttagaaattatttgatactgtaaaatgtcttaccataagtttttaaagatacccgtcaaactatagatgttactgccatgtttattaaaaaaaaaaataaaacgaaacaaactagtaagcaagcttaaaatttttctttttcctgccctggactacagatttttttttcttttttttttttgagacagggtctctggtcacctaggctggaatgcagtggtgtgatcacggcttgattctgccttgacctcccaggctccagtgatcctcccaagtaggtgggactacaggcacacaccaccatgcctggctaattttttgtatttttagtacagacgaggttttgctatgttgctcaggttggactcaagcgatccactcacctcggcctcccggagggctgggatcacaggtgcgagccaccgcccccagcctacaagaatttgtaaactcatagattgctcttctgttttcactggaccacaacagaaagtagtttcttttatggtgagggatgaacacctacgattgcaatataagttgttgggccttgtgtccatggagctcacttggtggttggtggtcttgaagcattcacattctttggagtagtggggcggctggctagtcacatggggaagatgtgcacacctgtggatggggccatcacacactgcagcgatagctgggcctaccttactgctcacctggctgggcacagcggctcctgcctgtaaccccagcactttgggaggccaaggtgggcagatcacttgaggtcagaagttcaagaccagcctggccaacatggtgcaccccctttctactaaaaataccagaattaaccgggcgtggtggcccgtgcctataatcccagctacgtgagaggctgaggcaggagaattgctgaaacccaggaggcagaggttgcagtgagccaagatgatgccactgcactccagcctgggtgacagagcgagactccatcacacacacaaaatacatatataaaaataaattgctcacctggtaatagtctggaaaacattttttttttgtttttttgcatattttaaagactttagaaagtagtcttgctaatccagaaagttcttgcggggaggagtttgaaactttgttttatctcactcctcagtcttagcccccttaataccataggtctctacttcagtaagagttacataatacgaatgccgtttgttcagaattgtgtatctccatccatccgtccatcgtccaaattctgcgagtttgaaatacattgttgttgctgttttgtatacttttgttcaaccattttctttttaacatggcactagctttctcaaactggctttggaattatttgtcagtttaaaaataaataccactttaaaaattactcttgacatgggagaacaaatatattttgatagttgttagagcataaatattttatagagcataacttgaaatttttcctgatacattgtgattgctttcagcttgtcctctgctgtaaaaaatatagtcgtggttagtctctgtaaagttggttattgggaatatgtgcttgattacgtaaatgagacatcaccaatttaagtcagccaaagtttagtcaatagaactttaaagaacagaagtctaatggtaattagggagagatgaatttatttgtaggagttttccccaaattcaaagcgtcttagtgacctttgataacttcctggaaaaagtaggaagcatggagagaaattccaggtaggagcccatgatccaattgactgcatcagcttacaaagtgttttctaagtcattagctattaattctgtctagattgtaaaatccctctcagttgtgtccacatttatctgtgttgtcctgtatttattctctttacctaatttccctgagtctcattttagtgggataatacacaagcttacagactcaggactttaaagagaagcacagattgccacgaaaacaaatgaacacagagaccagtagcagcagagggagatctgctgtgaggcttcccttagttctgttgtctgatttctgtggataatgagttcactgcatatgttaggtcacaacatgatatcgtgtagtcgtaggtacagaacttttgttatggtagcctttcttcgtcaggtgatacaattgggattttctttctcacatgcacctcagtaaaattttcagcaacagagattggctcaggatggaatttgttcagtttcagttctgcagcctgtccttttctggggagactcattaattgaatgttgcctttcgatctcactgagtcacttgaaatcgctcagattgacccctattccgggatccagcctggtccagtgcagacctgcattgactctgactacatgctgagttggcctctgaaccagttcctgtaccattcccttagtctgatggacttgccagctccaaatactcagaacgtgcctcttgtggtcctaggatcaagtccagggtccttagaatcaagtaatgaaacaggtccttagtaatcctgtgctgtagggatccactgttagttcctggtactccccagcatctgtgcattagcttgatggaaaggaagctgtgttatgcctgtcttcaagtttttgcttctgctgtttccatagctgagaatgtttttcctcttcactactctgctacttctccttccatcctcaatactgaatagcagaaagtgccgcttaagaacacaggaaggtcaccatagctttagtttctccttagctgccaattagttctttggtcctaaagttattaacttttctgagtcttgatagaaatgcggagacttaaaaatatttgggggagacatttctccttttctcactaaacaacagaatgaaaaccttttctaacaggtttagaaaaccaaagtcagaaaaattgtgaggaaatagaataggttttttaaattgaaataatttccaagttccaggtggatctgtaaaatagggacaagatcataactttcaaaaggcagcacgctaagtcaggtgattcctttcccccatatgccttttctgtggtttgaataggtcagagatgccatctttacatttccaagtcaaattcctcttccttcttgaaggtttttgggatttccctaacttgtatagatctactttcccattactccttttgagttcataacccacggttttgctggttgacagtgatttgtcttgttccttgcttgtaattttattaggaccatggagccaaagtggctggtttgaatctcagctcttcagtagctaagctctcaggcaaataatttaatcttcttgtgcctcagtttcctcatctgtgaaattataattttaatagaatctactttaaacattcatagaaatcaaattcgtacacatgtcaagtgcctagaatagaacctggcacctggtattaagcccttggacttcaactgctactgttcttagggttgtgacatcctcgaacagagatgttctttggatagaaatataaggcttacttgatgtttgattgtccttgccatttaaatatgttatagaacctggcacataggtgctcaataaatgtataataaaactttattttgctaaggtgtttattaacaagatggcatgttgcttattaaacagttgtgattttttttttcagtaaacgatggtcatccccctgcagtttgccttccatttcagagatctgtttattacactttctcccttaatattgtcatttgtcaatttctgctcacacctgagaggtgtccagtgtgcactttgcccatctcgcctatgcataggctccatctagtggccagaagggaaattcagcatattaggtgactgaattaatagtgccccaaggaggaagatagcgatcccaacccactctctggcttgcttcctggggactgattgcaagaaaatgtggatactacagacttctgtagaaatcactgggctacagttttggattaaggttactctactgtgtcagtgcgagctgtcctgagagaattagggtcttcctaagtgatgcagacaggcgcactgcaactccatggcagagctgttaacacctagtgtgtcttttacagttagagttttaagataattttacaggactttaataaatttaaagctccaaaatatttgagattagagattaaaaaaacactactgatttcatttggaaaaatacagcaagatttaccttccattgctctatttaaacaggtagtaacactttcattctcttctctctcccctttggctattctatgtggttaagatgctcgccagccagaaatactcacagagaataagaataaatacatccagtgttgtgttaggtcccacaccgtctatatttcgctagctaattttatgtattttgtttcatgttttattgatattttcagaatctttcttgctgagattacacaaaatatatagctggttattcagttttacgtgtcaaaagccttaaacctgtttccccatgattgccttttattatttttaattcggaaatctttgtttggctgtctgagagagaacttcagcctcccttcctcccagacattttgaacagttcaggctgtactcattcgtgtctctttgtcttggcaggtggaagcccctctgcttggaatagcaaacaatactaccagcttgccctctggcaagctcctttaagagttagctgtaatttcaccctctctctggccttgattctgcatgcagaatgattgcactgacttgagctcctgtggtctcttgctatacctcctatttgggcatctcccccatattgctttcccccaccattggggaggggaatggtaccttggttatctttgaattcccaggaggtggcccagtgcctggtgcataggaggagctgaagaaacggaagacttcttaaagggatactcgccattcactttgaagcacttctttgtacaacaaatttattttcatctgatcattgcacctctgctagccaaaacattttatcacaccagttactgctgcatggaacttgaaagcaataaaattatctttaaaatcattgtttgattaggctttttgcacattgaggtgaataaaaaaaattagaactcctggaagggtaatttgtgagtctggccttgtgtcaagatcacctcatccctgtggatggagactttgttccataagttccctatagataagatgtaatgaataattcattggcaccgatttatgtctgtagtgtgcttttaaaccctcttggagctgggttcctgaggaggaagcatctgcaggctggactcggctgcctggtggtctccggagtggcctggtgcagagggccagggtggcatctcagaaagttgggtgggtagggtacttgcacacctgctgaccttgagttacagggtggacctaggtcatttcacaggcccttccagccttcagatctcaagatactaggcagagagagagatggagatttgagggagatgtggttggaacaagcagaatcaccacgtatggaagttggcttctattttttgcattgttttcttggtgaggccagtaagcttttgcctcactcctgggagggacagtagcaaggtcttacaggtctctctatcattgaagcaccctctccaaccctgccggttttggttgctggtgaaggcctttgacagtgtcctggtagggcgacggtgaggccagctcccgacctctggacagaagaaagcttacttgtctaggttggtgtcaaggggactcctgaacttaatgaacaccttagaaattatccttaaagtctcctcttccgaggagtggggtgggatatttcttgcagaaaatgtaaacataatcatttgaagctggaatgttaatattcaagagtagcttgtaaaaaagcatcttgtgaaattctcatgtgaatgctgaaccggctggatgtgaacttagctggacagcctggcctgtctttgctctgctcttctccgtgcggtttgcatatgtgcagggcttcctttgaagccttgtcccctcaaacaattcactgtctccctctctcccacgcatggaggcatgttggaaagggagctccaggcctcagtgtctctgcctgtgattggaataacactgctctagcagggatgccaatgagaattagcaatagataatgtatccaagctgcccagcaaacctggcaaatagaaagcatccaataaatggatgcttttctctttttttctcctcctcatggtgggtggccctggtgggctctctctggggcctccagtcctccttccccacaacactggggaattgctgccagttgaatagggcccttttttttttttttttttttttttttgagacagtcttgctctgttgcccaggctggagtgcagtggtgcaatctccgctcactgcaacctctgccttactgcaacctcttcctcccaggttcaaacaattcttgtggatcagcttcccaagaagctgggattacaggcgtgtgccaccacgcctggctaattttttttttttctagtagagacggggtttaggcatgttggtcaggctggtctcaaactcctggcctcaagcaatccaccgacctcggcctcccatagtgctgggattacagatgtgagccactgtggctggccaaggagggtctttttttgcacatctacagtgaaaggtttgaacccggacgtctgagtctcaggtcagttgttgaaaccactaagtaaccaccttgcttctctgtgcctgaagagaatgggtttttaggttaaccaggctgactggttcaaggtcatgtccctatctgtggaaggggagtgggagtggaaggtgagtggtgacagagtatggaaccctgtttctgatatctagattatttgagggcctccagtggtctctgctccatggaaagcatatgaaagaatatgattttttttttttactcgagcttgttgtctagttgggaaaactcaactactggtggagagtaacagatgctatgagtttagtgctaagttatgggatgctgaccggagagaagtatgtgggctgcaggcagtggggtcacggaactgcagaatggcttgagaagctttaaggaggatgtctgactttagtgtgccctaaatatttgactctcaagatccaaggaggcagctccccaggagaggaagggaccatgtgtggtgtgggtggcagtgtgcactgatggagtggagagggtgtcagaatccggtgtttgtgtggtgggaaggaattgactgctggctagagaatgaggagcgctgaaacctttgcaccattgcagtggacccgctgagaagggtgttctggggaggctgctctggtctctcgatggagtcaggattgggggacagatagacaccccggtgtgagccagtgatggtatagatgagggaggcagtgaggacaggctcagggagggaagtcttgtctctagacctgagaccaggaagcaggaatggactggacaggttggcccagctgagggaggtgactggtgagatgggtcctcggtgtgaggggctgggttgccagaggagctgtgggctggggtggtttgtcgagagagcagtcccagttgatggagaggcaggacccgcaaaacaggttggctgcaggactgggggcggtagcacagggcagctcccgaggagacacctggcacttttaaggcatggaatggagagagctaggggagagcacacctgcagtgaggcaattcacatagcaaagttctccggaaactgcagtgttcaacttttttaaagaatagctggatgttagaaaagtggaggaactgtcacctttattaggggcatcatggatacctggtagcatcaagggctagggttaaaacccgtggagtaatacgccctcctattgtgttcctctcctctaaaaatgaaggtgaaactgtttcaggtgagcgctgttgttgttcgtttgctggggcactgctttctgatttttagaggagtccaggctggagactgacccctgcctttttctgagttgggccggctgggcccgaggctggttctgggctgggccaggctgatgcagtggccttgggcttcccgaggctgggagagggcggtggcccccgctaccctgaagagctggccaacgcggcagggctctttccagtccttaccatgcaagtgaagaggaacagtttgtttaaagaggggtgccagcttcacatccaggcctggactttgctactggtgcttttgaacttgtgttgatttatgtttgtaaattgactggacacattgtggttcttgatgagaagcaattgcccatccttagcccacgattagtgccactctctgggtgctgcctgttctgccactgtaactgttttcacttgacaaataacattaaaaaacacagttctgcaagagacttcctgggagggtggtatcatttggcctgtgggcttttgtaacactttcctgctattaggagagtgaattctgaattttcaatcacgttcacctgttggagcaagtagagtttcagacggtctccgcttttctcgactagaaagcaggccttctcccttttccccccagtcttgtttcatgacaccattcccctctgagatgagggttggagaattagaagtctactgatgcattgtaccggggcacgttattgaccctctctgctctcctttcctcatctgtaaaatggaagataatgccacccatcaggccgagtgcggtggctcatgcctgtaatcccagcactttgggaggccgaggtgagcggatcacctgaaatcaggagttcgagaccagcctggctaacatggtgaaaccctgtctctactaaaaatataaaaattagccaggcacagtggcatgcacctgtaatcccagctactcaggaggctgaggcaggagaatcacttgaacctgggaggtggaggttggaggttggaggttggaggttggaggttgcagtgagccaagatcgcgccactgcactccagcctgggcgagagtgagactccatgtcaaaaaaaaaaaaaaaaaagtgtcacccatcttggaggatcgttaccaatacttcatgagtgaatacatacacatttcttagaacctagggtttataaacactaggagttagctgatactattgttgctaaggatagaggaaatacgcattagaagttatttacttcctttaaaaaaaaaaataccctttgggtgtgtattgattctgatgttttgctcctagctacatttgccgtttttttttgactgcagaattaggaaccagcttcatttttttttttttttttggatggaatctcgctctgtcgtccaggctggagtgtggtggcgcaatcttggctcactgcaagctccacctcccgggttcacgccattctcctgcctcagcctccccagcagctgggactacaggcgtccgctgccacactaatttttgtatttttagtagagatggggtttcaccgtgttagccaggatggtcttgatctcctgaccttgtgatccgcccacctcggcctcccaaagtgctgggattaaaggcgtgagccaccgcgcccggcaggaacccagcttcatttcttgtaaagagagtttgacaagcgctccactggggatagcagcacagcttcctccttttctgtccctgtctccctcctgactctgcatctgcctccgtttgaagcatcctcctccagtaagtgggtcatttggattccaaggcccttttgaggccatggtgatggatcatttgcgttatcaatgtgaactgtggatgtcccttcgcccttcagtctcttccttcttcaaggagggggaggtaattgggggtcatgtggcctggggaagagcctggtcacgagcatgagggatgtgagtgggactatgtttccagccaaaatttagggcacaggatctgaaaaacacttagattaagtatctgcaacacaaattagggtattttaaattgaatgtggagaaccctgagaacctgtgccctttgtgcgtggatggctgcttgcaaggatgagcatccccagctggagcggcccatggctgccagaacaggagaaggcttcagtcaggtgggaagccagctgcagtgtgttgcctgatgcaggatggtgcgagaaggagctgctctcttgctctgctccctggatcgcacaaggtcttcctgagaccagaattcaaggttagtcctgtttaggcaacttggtagatggacttgaatggtcttgctaagcgaatattgcctatggtggtatttgcaaggaaaacaaaagtgttttgagcccagactaaccaatttaacaatgctagtaggtaaggatactactgtttgctttctgtgatgagaggtctcttaggaggaggggttaattcttttgatttaaaacttactacttgaggcaaataggcacatgaaaagatgttgaaagtcactagtcattggtgaaatgtaagtcagacccacaattggtacttcatactcattagtatggctattaccaaaaacaccagatgatagcaagcataggccaggatgtggagatgttggaacccttgtgccttactggtgagactgttaaaatggcacagccttttttttttttaacaggaagatgatatggtgcttcctcaataaattcatcatagaattgccatatgatccagcaattccactttggggtatatgcccaaaaagaagtgaaagcaggggctcgaacagatatttgtacacccatgttcatggcagcaaataattcaaaatagccaaaaagtgaaagcaactcaagggtccatccatagacgggtggataaacaaaatgtggtctatccatacaatggaatatcattgagccttaaaaaggaaggaaattctatgatgtgctacaatgtctgtgaaccttgaagacactctgcgaagtgaaagaagccagtcatgaaaggacaaacagtgcataattgttacccttacgtgagctatgtagagtagtcacattcatagagacggaaagtagaatggtgaggggcggtgaatagaggctggggggagggagcaatgaggaattggtgtttaatgggtacagagtttcagtttgggaacatgtaaaagttctagaggtggatggttacggtggttgagcaacattgtgaatcagtgtcagtgaactatacacttaacaagggttaaaatgttaaattctttgttgtgtatattttaccacaattttaaaaagcttatttctcaattgtttatgcgagtatatgtgtggaatagttggggagacaaattcaaggagaccagtccttgtccatggcggtcctaggtaccacgggatcactgcgggggaactgtgaggtcaggagaggccttgaaaaaaaacgcaggtttgagctgagtcagatggaatgggtctgttttctatatcaagagacagtattgcagataatttttttctttcaaggaaagcaagtcaggagtcaaactcatgccaccgtagtcacaaatgaaatttattgctaatcagccatgtgacgtgtaattgctttttcattttcttatttttccagaagagagatttgtttagatgtttgattccctcactgattatgattatactggaagtttttcatttgttttgacagctcaattttttttttattgtaaatggactgcctcattacagaggggggagcccttgaaagaaagggattgacctctgcaggcaagaatctgagcatcctaaaagtagaaaagggctagaggcttcgccttacaggccaggaagcttggagggacgcgctgctagagaccatggcacgcatgctgtgtgtcgaaggccaggtccgcctgtctgcctctccagcagatactctctggggctatttttttctgcttggttgtcatcctttggtttaaccaggcgccagggctcaggcctggacctgctggattccaaagaagacttcgaggtggccgagcttgtctggcttccagaggagctttctctgtcccgcccgggggagtggctcaccttggtctgagaccaatgggaggaagcctgctgcgggcaactggtctgtgcctggaagttggacttgcattttctctggacctccaaagcaaacccgaatgaccactctcatcctccccttttgcttgtttgtgtatgtgcttgttttgcctggtcgtcaggcaggaggtggtgtcagatgatgagaggtgttgctcgtccctgggttggttctcttacggggctgtatggatgtcttagctcagactgctgtgacaggttactatagactgagggctaaaaccacagacttatgtttctcacagttctggaggctggaagtctgagatcaaggtgccgaccaaatttggtttctgttaagggtccatttcttggcttgcagatgacaaatgtcatgtgtcctcacagggtggagagagcaaggggctctggtctcttcctctttatgtaagggcattgttgccattatgggggctctaccctcaggacctcatctaaacctgattacctccctaaggccccaccttcagataccactgaaggtatctgggggttggggcttcagtatatgaattggaggggacacagtcatgcagttcagaacagtggagcagtgtgccatagtgaagggatctccagaccaggattctctatggaagttcttggccaggtctgagagttggttacagatcattaaaatttacatggaatccagtacttgaaagtacatgtcttcaggatggcgctgagcacattcgcctctgtaaccaaatgcctgaaatgtgtagtgcaccttctgagcaccccagtgctttccttaaagtgaatgcagtttgagaggaactcaattattgagaaattttatatgaccccatttctctcattttaggacagataagttgcttattttaaactctgcaggagctacatagaggaagttatactccaggagagcttaaatttcactctctgaaaactctgttccatgtaagtacattcctcctctctcccctcctcagtgagcacgtacccatcagatgtgtggaattctattaaaagcagctcctcgtgaccctccagggtctgttttgtaaagctgacaccagcatcagtgagttggaaggggctgccacagaagacagacttactgctgcagcccgcttcagagccctcagtagtactttttcctctcccagcaaatccaggaggctgggaaggtgattgttaattgtttatgagcattaactgtttaccagtcatacttactattttaaatctgaccctgccattatgttgttttgtttctgttcacagctgagctttaagctgggtagaatttcgtgatgagtcactcctatgactgtaaaatcagtatcgatcaagccttcctgttcatcctgtgagcagtttagagacagatgagacaggcttatggtttccactggctcggctccgtgcgtgtgcggattgggcttcctgagagcctggttagccccttttatctgctctctgaaacctgcgcaagggtgtttagcatgcaccttgaaacctctgctgcctgaagacagtgtgcttaaatgaagggtatacaaacccatgtgaggttttctcttcccttttccatgaactccaccccaattacctgtttgaattttgcatgccagttattttcagggaactagtgacccttttcttgccaccctgggctttgaattgaaggccagtgtgccaccttttctttggctttgttagaacgttgccctcagggtcatatgtgctggctgctatgaattcttactgcttgatggacagagaaaggtgagggttagatatctggacagggcatgacagggcgggtcatcgagtaggaacattgggaccttttgcttccaggcttgagcagtgggtgagaaacactgtcttcccattagggcagtgggtgaaacactgacttccctccatcctctgggcagccttgtcaggtgggtgtggaagctgaggtgtgtctgccccaggctgtgcagtcagccccgtgttctagcttcccgtgccgaacctggccctggaggctgtctgcctggcaagggggctgcacaaagctcggaggggcatttctggtgcttggtagatggtaggcctgcccccagtgcactgataagagcatgggctgagagtgccacttggattcggctacagtgggcggcagagtgggggtgactggtgttgcttttactctagagcagaggaggcagatgaggtagatcggggccccagggatgctgagctgagctgggtagagagaatttggttttgtaggatttggagacagagacaaatttggagtgtttggatgttcggggacctgcaggaggtatgtgaggtgtgtaaaatgcagcccctgttttaaaaagagcttacattgtctcttgagaagataaggtgtgcccagctgtggaatggaaccagatgcttttatgagtgaggatggagtgagcacactgggaaagagccctggaattggaggaagagatcattttgcccagagggatcttggaggtctcctggaggagggtacttagatgatcagaaggattatactagacttgatggggtggtcttggcatcagaactttaaaaatgtattttggggctggaagcaaggctggagaggaaggtttgtttaagttgtagtgggggatgaggctgggggcaaatcagggatggttttccaggtctgtaaaggctggggtaagaggaatggttggttcttaagagcaaaaaaaatcccttacatattggttctcttatttgtgctaagttaaatacatgggaggctactggtgtttatgaaataaccctgagcctttttggggaggtagtagtggatgtctgatggaagagatagaagactggtcccaggggttcttagtggcaccttcctctcaggtcatcactgtgcttttgcacattgcagttatatttgactacatttgattatggcagatttacttagaagggcactggaaaaaagcctcccaaattacaactgacacaggaaatgactttattttcttctattttttttctttgcttttctcccccaatcaacatacatttttaaacctgtcatctcacatgacctgccggtagaattgatatgtttaatttctgtagaaaataactggaaatatttcacaagctccagtagcttcctgttgtagggacccttaggactttggaatgagaagttttctattgagttgtcatatttggaaggataaaggtgccctcttttccctcgatccacatagtagactcctgtgtgcgggcatttgtttggtgtctcacgttgatgcaaatgcagccattgcagagtgagccccgctctgttactggatctccatttgctcaaaagagagcagtgtccccctccaaatctgcatgtctgaaagcattcatgcaggttcattgcatgggtctttgcattttacttagacttagcaaaaatcaggtatagtctttcctgaaaacaaaagtgaccattgtttttaatcaactgcagggtgtttggagttgtgaaatatttagggtcccgagtccattccagattcaacattgggaaagaatgagaaagctgaagcctggggcaggctctgtctgcagaaaccatgggctatcaccccctctccttagcagcattgtaaacaaacgtcatttgtaaggagcatgtcccaactgagcttgtaattataggggcaagatttgtgtggtggtaggggcatggagctggagactgggggcttccttattggttcatttatcctggcccttctcttttctctcaagtctcagctcttttaagattcagaaaataatgcaaaatgcctaagatttctgaaattcctggcttcagagacttgactacataaaagagccaggattttcaggctggccatttcaggatcagccatttcccacttcctgattcatagcttccaggatttgtaatgcctgtagacttttttctcttttgcttaaaagtggccattgaaagaaaaaataaatagcaaaatccccatcccagaagttctacttcctgttgttgtactattgagctctgaaaaacagctttgtaagtttaggctcttgtttggactatttcagtggaattcttgagatctttttgtttggacaggcaagtatgaaggcgataagtcgaaagaactacagcttactcagcacagaaatgcagaggctcaaatttaagttcttccttagctttatggtgtgtatattaatataatccaagcaatagtgagttgcttagccagggtgcacagacattttccacaatgccagttgtttccctcataatgtttaatgtttatttttaaaggacatatttgggcacacgtttcatttttgcctgtaaaagaattgggaatatttatgattcttgcaacaaaggagaaggatccaaagtaaccaagaaaatgatggactggcagccttcacattttcccacaactcttttcatgaaataaaatgtagataaggctgggtgccatggctcacgcctgtaatcccagcactttgggaggccgaggcgggcggatcacctgtggtcgggagtttgagaccagcctggcgagcacggcgaaaccccgtctctacgaaaaatacaatacaaaaattagccgcgtgtggtggtgtgcgcctgtagtcccagctactcgggaggctgaggtgggagaatcacttgaacctgggaggcagaggttgcagcgagacaagatggcgccattgcactccagcctgagtgacagagcaagactccatctcaaaaaaaaaaaaaaaaaaaaagtgtaggttagcaaaagtgcctacagttcaaatgcttccatgctaaacgttgtatttcttccggtctcatttgtgatgagagtcataagattttgagaaatacaaaaacctttccagctttataggatgataatggcttggccactcaagtagttctgattgggttaactaattttggtccagtaatcatttcatttggggtgaatggatttttcccccctaaatacgggtacctggaaagttgaagcagtgaatctggtgaaacttaatcagtgatttcgtaagggttaacaaatgtttctgggtgggattcctaatgtccagcttcctctgtgtagctcagtaagtcttctttggagacactagcctgcattgtaagactgtcacatgggagcatctttttattttattttacttttttttaaaaaaatgaggtctttattatcctggctggagtgcagtggtgtgatcatggctcactgtaaccttgaactcctgggctcaagtgatcctcttgcctcaacctcccaagtagttgggctgatagacatgagctactgtgccacgtagcattcttggggattattgtagggtccttttggaccacacatggttttatactctgtagctgattgatgtactggcatgtcagtgacattgtgtgtatcattacactatttggttaattgatgtactggtggaatagccatcttctggaggctcttgtttgcatacttctcttagtggcggactagcggttgtacagtaaatagatgatcattctcgctctgttttacctttcctcagctgctcttctagtaggaaaataacagccctcttagctgtagtcttctggaggctctctcaataatagaagtggaaagaaaagactcaaatccctgggcagtgactttttagttgtttcatttgcttttaaggcagaaacacctttaactcttagtagccttacagatcatttttgaaaacacctgtgcttgccttgaatggggcggtgaccactggatccccccatgctgggtacatgttttgcagtcacagacactgctggcctcacctttggtggtgaaggaatgtttccaatttctgctgatggtgtagtgctcttgggagctgggtgctctgaatgagcagatgggcatctgcttttttaagcgtgctgttcattctgcaaaatagttattgtgcaaatacctgataagcaccaggtctgtgccaggcgctgtattttgtattttgcatgtctgaggccagcatctttttccctgttcctttttctcctcatccagtgaactttccactgtggttgtagtttgtctgaaaaagatttggaaaaaatgtacagccatgtttctcttgtctagagaagctgtcttaaggacttcgacaagtttcattggcagagtgaatgagtggtggcctctgaatagttgaaatgttaatgctatctataggttctagagaatctgtgtctttaaaagtcatagcgataaagtctcagctttttgagagagtgggtttcagacatattttaaaatactactatacaggaaatctgattgttgcattgaaacaggatttgttatcacatcacggttagacatacccaaaaggcaaaaactacagtggtcatgatggctttacataagattttggaggagaaactgttagctccatgaaagcaggaactgtgttcactcttgaatgcctgctacctgcacatggtgaatgttctataaatgtatattaaagaaatggaggtccttagagttccaagatcaccgtcaatatcatcaccctaggcttcctcgtccttccagttacttcttttccagaagagtccattgcctcctttatatgaggtctacagagcgcgttcagagggctcttatcattgattcagcaatcacgtgtacacatagcactagaatgacttcacatatttgacctgtttaaaaataacgtgcagctatgacgaacagcgaacctttgattagggacacatttgcctgccgccagacactacaagtattatgtgtattgcttttttcaaattataatagtaatagatgattatgagaagaaaattagaaaataagttttctgtctctctataaaaggaaaataaaaattatccttaatctcaaggtaaccattgttaatattttgttgtgttttcctgagattttccccctagacttatatgtgtatctatatatttaaaaaaatgaaattagtagtatactatgtacacacatattgtgaatttctgcccataacattatatctttatcacctggaatgaggtctttaatgaaattattaaaattaaaattattctataaatgctaaatttaggtattttacaattttttttttttttttttttttttgagacaaagtcttgctctgttgcccaggctggagtggactgcagtggtgcaatctcagctcacttcaacctctgcctcccaggttaaagcaattattctgcctcagcctcccgagtatttgggactacaagtgcatgccaccatgcctggcaaatttttgtatttttagtagaaacggggtttcaccatgttggccaggctggtctcaaactcctgacctcaaatgatctgcccaccttggtctcccagagtgctgggattacaggtgtgagccactgtgcctggcccattttataattttgatcattaaaaaatgatgtgataaaattattgtgtattgttgttgatacactactctgattaattctttgggctagattcctaaaagtggaaagtaaggaataagaattgtgtaagtgtgcatgatcctagataaatattgccaaaatattttgcagaaaattcttagtttcagcttccagaagcagtgtctgtcatccatactccaccagaattgaacactaaattgagctttgcaattttagcatttaaaaagttgtatcatttaatatagaatagcagtctcttcattatgatcttcccttgcctagtaagtttatactcaagtcaaaatcggttaatcatgcatattgattccttgtttatctttttcttttaattctttaatacttctagaatgtatttgtagttaagtgaagtaagatacctcctcctgttgacgatttagtttccccacattgtgctgttttttttcttcactggattatgtaacaatatcttttcttttttttctttctttctttctttttttttttttttttttgagagagtctcgctctgttgctcaggctggagtgcagaggtgtgatctctgttcaaagcagcctccccctccccagtccaagtgattctactgcctcagcctcttaagtagctgggattacaggcgtgcgccaccacgcctggctatttttttattgtatttttagtagagatggggtttccacatgttggcctggctggtgttgaactcccggcctcaggtgatccgcccacctcaccttcccaaagtgttgggattacagacgtgagccactgcgcccagcctagagactctattttattagtgttttttgtagacaaagtctcactctgttgcccaagctggagtgcagtggcgccatctcggctccctgcaacctccacctcccgggttcaagcaattctgcctcaacctctcgagtagctgggactacaggcatgtgccaccatgcccggctaatttttgtatttttagtagaaatggggtttcactatgttggccaggctggtcttgaaatcctgaccttgcgatccgcctgcctcgacctcccaaagtgctaggattacaggcgtgagccaccgctcctggccgagactctattttaaagctgtcttctcccactgatttgccttttgtttgtggtaaaatcattttgtcttaaacactgtagcttcattatacatgttaacatctgctaggaagaatctccactcaggttaaaaaaaaaaaaatttgaagcaccattatttcaggtgaactttgtgtgtgtgtatgttgttttgtttttgcaattcttctccgctactcttccaaaaaagaaaacacaaattcattaggttttgattgttaataaatcagtttgggagaaaacatttccagatatttgaattactcattcaaggacatttcgtgtttctccatttactcaactattatctatctatgaagaaatcacagaaggtcatagaggttgtatacttttccttttgggttatttctggttaatgaatgctttttgttgctaatgtagaaggaatctttattccccattgtttattttatatttttaaattttttttcaattaaaaaaaatttttttttcattcctgagacagggtctcgctccgttacccaggctggagtgcagtggtgcggtcatgactcactgcagccttcagctcctaggctcaagtaatcctccacctcagcctcctgagtagctgggactactggtatgcgccaccatgcctggctaagttttttctttttcttttaggggcaggatcttgctgtgttgcccaggctggtctcaaactcatgacctcaagtgatcctcccaccttcacctcccaaagtgctggcattgcaggcgtgagccaccatgcctgaccttccttgtttcttttaggtgattattggttgtgtgtgaggaaagctctggtattttctgtacttatcttgtacctacccaatttgttgattgctcttattcgttataatagtctttcagttgactcttcctaatttttttgtgccgagaatcattgatgacaaataaggataatttggtctccatttttctggtacataatacgtctttacttaccatcagttgtgtgtcacttaggaatataaatggctgaaaataactgaaagcctgcctaataagggagtaggccgacaggggctgacttttctcaagttcaggcagtctggagggaaggagtctgtggctgctgtgaggtgctcaaagagggtgtgaggactgggctcctggcttctgtttgttcatccttagcctgtggcttttgtcctcgtgaacacaagatgacctccaggaattatgtctgtttcaggcaggaagaagttgagaaggaatgaagacaaaaggcaaaaaaggcagaatgacaggtcagcaagcgctgctcagccagtaggccctgcttctccttggccagaactgagttgcatgcagctggctagaaggtgggagatgaatgtgggtatggctagtgggttgggcatgggggttgggccaaccaagcatggttggtcatagggtcttgctgcattagcctgcacatccagaattgttacatgttgattacaggcatatttgtccttttttgtctatattaatgataatgcctctgtttctcaatgtgtaaggcatcttttggtttaagaggttttcatcatgttgaagaattgcctgtcttgttttcttgggtgatttattaaggatgggtgttgaatgtcatcagatgtcattttggcattcatttggattcagaagtggttgttacacctattaattgaggtaggaatagattacctagtagtaatccctcctcaaattcccgtgttaaactatttttggttgcggtgggtggctgtttaaattcctaattaaatttggtttgctaacatattcagattttttaatctcttattttaaatgagatagctttacagttctctttagatgagttcttttccagattttgctgtcaggcctagactagttttgtaaaatgaattaatgacttttcctttttaccttctctgtaacagtttttatagtgtggcaataaactgtcctttgaaggtttggaacaactcacttgttaaatgcctggaggctgacacttaaaaaaaaaaaaaaagaatagtttttgttgtgtttctttttgttgttggtgttgtttttagtcttcagtgcagtggcataatcttggcccacttcagccttgacctcccaggctcaagcagtcctcccacctcagcctccctggtagccgggaccacaggtgttttgccgccacacccggctaattttttattttttttgtagtttttgtagagatggggttttgccacgttgcgcaggctggtctagcattactgggctcaagtggtccacctgccttcgcctcccaaggtggtgggattaacaggtgtgagccaccatgcctggcgtaaaaagatggttagtttttgttttgtgacagctttaaaaaaggtcttccatgggtgttggtctgttccagggttctggttctttcctctgatgctcttttttttttttttttttttgaaacaggatctcgctcttgtcccagatggtgtacagtggtgtggtcatggctcactgtagccccagcccactgggctccagcaagcctcccacctcagcctctggagtagctgggacccatacctggctaatttttaaatgttttttagagacagagtctcgctatgttcccatgctggttttgaactcctgggatcaagcgaccctcctcccttggcctcccaaagtgttgggattacaggcatgagccaccatgctggccttctggttctttttaaatcaattttagtaatttagtaatttccagcaagtcaattaaaaattatagctcagttgtatgtagtattttctgtgtggtgttatgccctctgtatctgttttctcagatgttttagttgcttttctctcttaatcttgattagatctgccagagctgtgcttattttgtgtccccatccaaatccagaattaattgccgtgctccacatgttttggtcaatggtggacctcgtctgtaacagtagtcccatgagattataatggggctgaaaacagtgctgtcccctagggatatcgtgtctgttgtagtgcaaggcactgctcacgtgtttgtgttgatgctggtgtaagcccactgtgcttccagtcagatgaaagtgcagcgcatacaattgtgtgcggtacctaatacttgataataaacaaccatgttactggtgtatgtatttactatgctgtacttttaattgttagagtgtactccttatacttattaaacacaaaattaattgtaaaatagcctcaggcaggtccttcaggaggtatccagaagaaggcattgtgatcataggagctgatggctccgcctgggttactgcccctgtagacttccagtgggacaggatatggaggtggaagacagtgacatggatgatccggaccctttgtaggtctaggctaacgtgtgtgtttgtgtcttagcttttaacaaaaaagtttaaaaagttaaaaaaaaaagttaaaaatagaaaaaagcttatagaataagaatataaagaaaatatatacaagaaccaaaatttaagaaaaataaagtttgtaaaagtaaaaaaagttgtgcttaagctaagtttaatttattattgaagaaagaaatttttaaataaatttagtgaggcctaggtatacagtatttataaagtctacagtagtgtacagtaatgtcctcagccttcacattcactcaccactcactgactcacccgagggagcaacttccagtcctgcaagctttattcgtggtggtactcccatatacgtatgtatacttttttttttttttgagacagagtctcgctctgtcgcccaggctggagtgcagtggtgcagtctcggctcactgcaacctccacctcccaagttcacgccattctcctgcctcagcctcccgagtagctgggactacaggcgcctgccaccacgcctggctaattttttgtatttttagtggagacagcgttgcaccgtgttagccaggatggtctcaatctcctgacctcgtgatccacccacctcggcctcccaaagtgctgggattacaggcgtgagccaccgcgcctggccttttgtttcgtttttaagagacagggtctagctctgtcacccaagctggagtgcagtggcgtgattatagctcattgcagccttgaactcctgggctcaactgattctgttgtgtcaccctccccaagtagctagaactacaggctcatgccaccacacttggctaatttttgttttttaattttttgtagaaatggaatctcactatgttgcctaggctggtcttgaactcttggtgtcaagcaagtgcttggcctctgaagtgctgagattataggtgtgagcctggccatatgtactttttttttttttttatccttcttactatatttttattgtaccttttctatgtttaggtatgtttaaatacacacatacttaccatggtgttacaactgcctgcagtattcagtgcagtaatgcactacaggtttgcaggttggtagcctaggagtaataggctatactgtatagcctaggtgtgtagtaggctataccattgaggtgtaagtatactctgatcacacaatgatgaaatcacctaactgtgcatttcttagaatgcatccctgtcattaagtgatacgtaactctgcttctttaagcctctgtagcactttggttatgttaggattctgtgtctttacaagtctgctttgctgatcgattgtgacatcttgagggcggctgcactactttctgcctgcaccttgtttcgcatgtctacctggcgcatgacatacacctcgttgttcagttcttgcttctctgcttgtgtctttgcattcaccaccagctattctgatagttatcaggaggttttcattgattgcagtctcgtgcaatgggtgcaggtaatgggtagccttatggaggagaaaatgcttacctatttgggttcattccaaggagtagttcaaggataaacctctaagtttggggagtgctgtaatttgctggatatgtgagccatagaagacagcttggatggcatctgatgcttcctggctgcagggatggaggcagcagaccctcctgcctggggtggttggttgccatccctgtcgggggctcatgctccaccctcaaggctattcttgggggagttgtgacatggctttcataaaaactcagtggaattttaccctgtgtattagttagtaaaggtgagtctggttcagttggtttgagtcaaaaaatctgttaatatctctgctttagacctgcatcaggctaatacttgaatttagggtctgtccctggtgtcatctgaatttttgtttgctatgtgtgaccaaggagatggtcactcttcaggatgggtgggtggaggggagaaatgctatgatttctgttgggtcatgtgaaatcaatttggaatgtggatggggcccttacactttttcttttgagcttagtgattttctgtgtagggtggagagcgattaggaaggaattcaccacccttaggtcctcaggcatagggtcttctaggggcaggactgatgagtgaacagcagggtggatggagcagaaccgttggaaccttcagggcaggacctgccaccattatttggtcacaggaagtgttcagtggtgaacttgttggaaatgattttgagtaacttccgtctcctaaatcatattaggactctttggtctcctatggttatctgagttgttttccaggaggagctgggaaggtaccaggagaaagatgactgtccctctcatgtttgctgagggtgttcctgtaaggtgagctagtgttccttttagggcccgtggagaccgaccttcacattgaagaagcatatctgtgctccgagatgttttcatggggagaagtgtcaggtgtaattataaaaggagtctttctctttaaatactgtaggcgatttagaaatagtggaggtttaattgaagagcttgtctacgtttttacattttccttaggcacagagaaactagtatctttctctgggttgcctttttttttggagacagaatcttactctgtcatccaggctggagtgcagtggcctgatctcggctcactgcagcctctgccttccgagttccagcaattctcctgcctcagccttccaggtagctgggattacaggcacgtgccaccatgcctggctaatttttatatttttagtagagatggggtttcaccatgttggccaggctggtctggaactcctgattaggtgatccacccgcctctgcctcccaaagtgctaggattacaggcatgagccaccacacctggcctgggttgctttttaaattcatacctactgtcttatttgggtctcaaatgtgatcagtggttatacttttcttgctatgcatttaagttggagcaggctccggggcaccacttccctccctagagttgatgaacccctcatatcagtgacctccccatgtcacagtgtatctcgtgtgcactgctagatattctgatcacacagtgctgagattactggtttctctccctttctctttctgtggttatagggattctttaagggcaggcaacatgttctttgtttccataggatctgacaaagtgcatggcataggtaggtgttcatcaaaaggggtggaatagggttgatctcaagggttttaagagagatctgacgagtttgggtgtgtgacttaaaaagcagatacagcgccttttcacggatacacctccgtgattcctcaagtggtctggctgtgtttattttaggattctaaaagtaaagtgttctgttctgagtctttcacgatctgatgttctccagttctgtgaggtctcctcctttagtcccatcattggggctgtttctgctcggaaggccaggaagttgctggaagtctgctgggctttgcaaagggacttttgcttgtgtgggcattgcccagttgtgttacaacttgtttacagccgttggtttttaagggatgaggtaatcttagctcagcttagtgtaatacacaacagttttgtttattgagaaaatcattgttgaagtttttcagatgttagagatgttatgaattgcaatcaagtcggtatcctcttatataagtgcatctgacaagcccatttcacaactacatctcatcagtcacagttggatggcaaggtttattgtttaaagtttttgttttttcttttttaagttgggaaaggaagacagatggtttcagaagccaagaaagggcacaaaggcgtggatatttggaaatcgggacataattcaccattcttcttaattttttctgatctctaagacactgagacagctgttaattgaattgcttgttcacagtatttgagacgtaatgaaatgtgagtgtcctaatcacctggcgggcgtagatctttgggatcctcctggaggcttagtagggctgccctgagcagtattgtcttctccagctgggcctctgagctgtaccatgtgcccgtgctcagcctcagtccctccctcagccagttgttaaatcactttggacgtgtgacagcctcaacatgtcacagctttaaaagttcagattttaaaaaggtaaggaaatgatctcctagtgagacaacttctgcctaaaaaataaaagcttctaagacataaattctgtgttatgaacaacttgcaattttcatagttttcagttttagctctggcagcctctgatagatcttaaatatgtttatcacagctggaaaaatgttttattgtcatctttgtttatcataatatgccacctactctggttgtgtcttacaactgtagctctgtggggttttttttgtttgttttatgcttgctaatgggggaggtggggggtgtgggcggatgaatataaatgatacctagaaattgaaattggaaaaaaaaatgtattcagccagtactctttccaggttatagctaaacgtcagttggcaacctctatgctgtggtttattgagtaacacttaatacttagcacagccctcagtgaagatcttttatggccttttctgaatgttatacaaacataactaaagcttatccagatgaggacagggacctttctttccttcctttttaaatggagcaaaatttggccactgggttgctgtggatgagagagtagaaggagaaaggcagtcatcgggagactgtgtgctgagagagcgcatgtgggatttggcttcaggaagtctgggcttgcattctatccagcgctaatatttagtgagtgtgatttggggcaaattatttcgtctccctgagcttcagaatgtttgaaactttgtgaggagtctgaccccacactgtaggctccctccatgtatatatttcttcttccttttccttttttttttttttttttttttaaatttttgagatagtgtctcgctctgtaaccccagttggaatgcagtggcatggtcatggcttactgcagcctcaacgtcccaggctcaagggatcctcctgcctcagcctcctgagtagctggggtcacagatgtgtgccatcacgcctggctaatttttaacattttttgtagagatgggagtctcactatgttgcccaggctgcactcaaactcctggactcaagcagtcctctccctccagcctcccaaagttctgggattacaggcatgagccaccatgcccggctggaactgttggctttgaagaagaatgatgctgtgcttgcctttgcagtcctgtcaccatacttcctggaaagtgggtggacacgctggatggtagatgttgagttctttagatgcctggatgcttacatgctttgtgtgggttcttactggggctgtaacttactagaggacagactccaacttctgcttacttagtctggggaggttaataataatctagggcacccgcttcccagtgggtttccatcagtctcctccagcccactctactctctgttagccagctgggcacctcttcctctgtgtcccttcggtatcttcccagtggctctttccacgactggctcagaccatgtgtatatctgctcattgtctgtccagggtccctccaaagatgcctctgtgggctgggcccctggtggtgcttcctccagataattgttgaagatggaacaggagtgtgcaagaacaccagcgtgcttccagtattcaggtctagcggcaggtcccaggcatcagcggctcaccactccaccgcaggtagcctgattgcccagccttggagccgcagcctccttgggtggtgtggcagctgtcagtgtctgaaaccattttgaactttaaagggtggtgtcagacagcagctattgaggctacttaaaagaatttttttaaatgtacgagttcagtggcattaagtacattcatattgttgtgcaaccatcaccactgtccatctccagaacttgttcatcttcccaaactgaaactccatgtccatcaaacaactccccattgcctttttccccaagtctttggcaaccgccattccactttctgtctgtaaatttgactgtctggatacctcatgtaagtggactcgtacactatttgtccttttgtgactggcccattttatgagcataatgtcctcaaggttcattcaggctgtagcatgtgtccagaatctccttcctttttaaggcccaataatatttaataatatatgtatgtgtgataacacatttatataatgtccattaccatgtggtatatatgcttatccatttgtctgtcgatggacacttgagttgctcccccgctttggctactgtgaataatatgactgtgatcatggatatgcaaatatttccttaagtctttcagttcttttgggtatatacccagaagtggaattgctggatcatatggcagttctatttttaattttttgaggaaccactgtactgttttccatgtagactgcataagaattccaatttttccacatcttgccaacgtttatttttatttatttttttaaattttttatagtagctatccattctaatggatgtgaggtggtatctcattatggttttgatgggacttttgagttttagcaaatatcaatgaagtatttaattttttttttttttcttagagacaggatctcacattgttgtccaggctagagtgcagtgatgtgagcatagttcactgcagcctcaacctcctaggctcatgtgatgctcccacctacgcttcctcaatagatgggactatgttcctgcgccatcactcctggtgaatttttaaatttttgtagagatgcggtcttggtacattttctaggctggtctggaagtcctggcctcaagcagttcttccacctgaacctcccaaagtgctgggattataggcgtgagccactgcacctggcttatttaaatttttatgggtatgaattcacttaaaagctgaaggttttgagaggagagggagcatgtgaaaaaacctaaaggttttgggaggaggaggagaaggaagagagggagcatgtgaacaagagcaactgattacttccttgtcattcatttgcccagtgtttactaagcacctgctgtgtctcagacctgtgctggtttggcccttgtgaaggacagtaaatacagtgcagttccagctgcgcatgggatcacagtccagtaggtaaacgagtgcctaaacttaagagaaatgagtgcagttggggtcctgtggcggtgaaggggcgagtctgcacccaggcgagtgttaaaggcctggcctagagaagatgggtgttttgatggaaggagctgctgggaagcatgtgtactcggtgtcttggagtttagaaacctcagttggctccatgtctcgtccttagtaaaggaatatcgggagctgagactggatgtattgacacaggtcaaatcacagagtcttaggccatttcaaggaggttggatttttctctggaaggcacagggaggttttgaaggacttaatgcagaagaatgggcactgtcaggtttgtggtttggaaagtccgccttggtagtagggtggagggtgcattatggagggctagaccagggtccagcccccagcgagatgctgtgtggtaaccaggggagagagaggtggtggtgttagaagccacgacttggcatagaagccaaagcatccccaggttgtcattgtgtaattaatggttaagttggggcaagaaataaagctcttaaaagtgtccagctgtagagctctctgcctgtttttatcttcagatttttgtctttgccatctctggcctccagtggaaggccgaagttacttaacttccttgctggaagcagggctcctcatgattgccagcccctgtttggtagtggtcctggagtgctgtggaaatgggatacttggtgccacttaccttggggctttgctcctgaactgcagcggtgtcttgtgctctgtggtttgtagcatggaacagaggctgatgggcggggagtttgagtcccagtgattgaggccccctgcctgcctgcaccttactgaaggaaggacatggtggcttctcagtgtgctctctggtgatctgaacctagattcttgtttcacgggtagggggcagggttttggattcagccctggccagccctggcccaagttcatagtgtcagtagtatagttctcccaccacccccttctctcctgctcctgttttctcccccgccccttctctcctactctccttcctctcccactctccctcctctctctgcctttcacttccccccacactctctctcccccgctcccaactttctttctctcttcgactcaccacacaacacacacctgtgtgtgtgtgtgtgtgtgtgtgtgtgtgtgtgtgtgatggcactgttatttcatgtgtatacctttgcgtagcgttggcacatgtgggaatgctattataatgctttcgttgggggtctgtgctaaccactgctgagtgtgcttcatgttttctagacagcatgagaccagagctctccaccttgccattagctggtgggagaattttgagaaagtcacccaattgctcttaagtcctcatttttttttttaaatctgtaaaatggtatcacagatgcttatagctcaagactagttgatgagggtctgtgactcaaaaggccccatagatggggttcagagggcctttggaaatggcgtgcaagctctttgtaagtgtattttttttggagaaagggcccagctttttatcagacatcctgagagattcaggacctaaaaaataaaccttgattaatcttggaagcctctttttacgcagtacgctttgattcatcagtatatgcatgtggatgggttctcagatggcctgatgtttctcctccttcctctgtgtggtgggcgacgactttggctgcccagatgttaacatcagtaagcagaagctcagtcagtgttagcaaaattaaatcactctgcaaaaatcaatgttagtgaaattaaatcacttgatcttaaaagcagcatgaaatagcagtttttcatcttcattgtgctgttttcccactctagatatcttgcagattttttttggttgcttggttggttggtttttggcgtccttttcaaggacaagcagctttggacagttgcactacttttttttttttttttttttttttgacagagtcttgctctgtcacccaggctggggtgcagtggcgtgatctcagctcactgcaacctctgcctcccaggttcaagcagttctcctgcctcagcctcccaagtagctgggattacaggtgtctgccaccacacttggctaatttttatatttttagtagggacaaagtttcatcatgttattcaaattctgacctcaagccatctgcctgccttggcctcccaaagtgctgggattacaggcgtgagtcactgtgctcagccagttgcactacattttttttttagatgccattgttgaggatccaggggtttgtcatagattgattaatcagaaagtattaatctaaagtattagaatatattgattgcaggcagggaccttgcatagtttaaagatgactcagaaggcacattaggttcttgccacactttgctgccatcacagatggatgtgagttgcccccttatataggtctctcgggatgccccagtggagaacagcattgatgttgaacagatcctgtccgatggagagataccagcgtttcagccagcggtgtgagtgagggcaggggccacctctgagggtgcttgctccctcacactgtcctcacgctgccctcaagctgtgggcaaaggagagggatcctgtgccatcacagccctagaagcagaattccaaaatgtgggctcctttgggtgtggtttgggggtcaaggagatagagcaagtaaggaatgaactttgagggtttatgatcattttcatgatgataatgacctaaaaacatgcttggctgggcatggtggctcatgcctataattccagcactttgggagactaagacaggaggatttcttgagtccaggagttcaagaccagcctggacaacatagggacaccccatctctacaaaaaaattaaaaaattagccaagcatggtggtgtgcacctgtagtcccagctactcaggaggctgaggcaggaggatcccttgagcctaagaggtcaaggctgcagtgagccatgtctgtgccactgtactccaacttgggtgacagagcaagactatcccaaaacaaaaacaaaaacacatgcttatggtaggcaattaaaacaggaggtaaggagtaaacatgccaggcccctcctcctctcctctgactcttccttcttcccccctgcttcccaagggtaagctttgcagatacttgctatgcaagcaaaaatgctattcttagccatcgtttaaacacagatttgcaatttgtggtttttcatttatataaattttggctctcttcctatagcagaatgatctttgtttttaaaatgattttaagtatacaattaatatgtgaatgtatgtttcttatggaaattagaacaatacacagttacagagtagaaggtgataggtgatatagctcaccctctcctcttcctgctactctccccagtctgcttcactccccggaaggaactactggcccatcagcatgtctccttccaggcattttttccatgtggttatgtccacctgcataagaaactgggggcggcagggtggggcggtgttggcgggtcaggcagaagcaagccacagagcagtaagggtactttttaaaaaaacatttaaatagatccctgttgtcctgcggcttacatgctcatgcatactcactgtttctttaaataaactttttcttttagaatagttttagatttacagaaaagttgccgcgatagtctagagagatcccatgtacctcttaacagcttcgcctctgttaacattctgtgtcaccatggtaatttgccacagctaaggaaccagcattagtccatgactgtcagtgaactaaactcaagactttttttggattttaccagttttgcccaatgttcctttcctggtctaggatcctgtgcagaatagcgcatcacagcacattacatttagctgtctccttcacctcttctggtctgtgacagggtctcagactttccttgtccttggtgactttgacagtttcgagggacactggccaggttttgtgcacactgccccttaatttggagttgtctcatggttttttttgtttttttttttttttgagacagagtctcactcgtctcccaagctggagtgcaatggtgcaacctcgactcactgcaacttctgcctcccaggttcaagcaattctcctgcttcagcctcccgagtagctgggattacaggtgcctgccaccacacccaactaatttttgtatttttagtaaagatggggtttcaccaggttgggcaggctggtctcgaactcctgacctcgggtgattgcccacctcggcctcccaaagtgctaagattacaggtgtgagccaccctgcccggcccatggttttcttatggttagtctgggaccatgggtttttgggagcaagaccacagagctgaaatgccctcccttcagtgatttgtcagcatgacctatcaccattgttgttaaccttcaccacctggatgaggcagtgtatgcgtggggacatacatctatttgccccactgacatgagggttggatctctagaagaggagtcactgttcagaggttataggcatttgtattttttggcagatgttgtccttcaaaatggctgtacacatatgctcctcccaaaagtaggagagtgcctgttgccccatgtcctcactcaagcttggtgttattagattggtaatttttttgtgtgtgaatctgttaagttaaaaatatttctttctttggccgggcacagagtggctcatgcctgtaatcccagcactttgggagtccgaggcgggcagatcacttgagctcaggagttcaagatcagcctgggcaacatggtgaaaccccatctctaccaaaaatacaaaaaaattagctgggcatggtggtgcttgcttttggtcccagctacttgggaggctgatgtgggagtatcacttgagcccaggaagttgaggctacagtgagccgagatcgtgccactgccctctagcctgggtgacagtgtgagaccctggctccaaagaaaaaaagaagattgattgagatagggtcttgctctgttcaggctggaatgcagtggtgtcatcatcatagtttactgtagccttgaactcttgggctcaagcagtcctgctcctttggcctcccaaagtgctggggttacaggcatgagccactatgctcagccaagctaaaaatatcttagtgtgcatttctctaattgtcagaagtgtatttatttaccataccctggaaaccttatgtaagatgatggtgagtttggactttccagtaacatttggaaactgtttagtaccaagctctcattaacaatataaacaaaataggggtctacccttaaggaatcaaagccattatctaaaagctctttcccgcaacaactacctgagataatgtccttggtcatatgccccagcatttaaaaatggagttagtgagagtctgttgtttaccacctgatacattggtaagagctgcttgatggtatggggacatcagtagggaggatatagacgtagccacccccgccctagatagtaggggcctcagggtggggtaagcctgggtgggggaggtatgagtggtggaacagtgggagaccctggatccttagtctccagcgtgattgcattttgccaaggctttgtcccatgtccctttgtcccgtgttccatttgcccgtggtgttgcctagagagcatggaggggctggtggagcatgctctgtggttccctaacccagggctgtgtggggagagcttgcagcacccccctgaccccatatgaacgtccttgctatttcctgctgtgccatccagcaactataggatgctgtgctgtggctgggagacctgtttggtcttggaagctgggtcctggatgagcagaatgaggcaggcatagaggtgatgttggctacgggcaggggagcgtttgctttgccttggagtagtgccatttccatgtagaggggcaagatttaccaccctgttgtggggatttgagactttgggttttgttttcctttacaccttgagctttgttctacagcaggtccctgggaagactggtccacaaagctgctgaatggggctgctgtccttcagccctgcctcctgctgcagaatgcagaggacgctgtagacttgcttggtgggtgcctggggttttctgcctccctggtgcactgggcacagcggcttgcctgccttttgggtcgtctccacctcccagggatgtttttgttccctgatcgaatgacctcctgttttgtttgttttttgagacggagttttgctttgtcacccaggctggagtgcaatggcatgatctcggctaactgcaacctctgcctcccgggttcaagtgattcttgtgcttcagccttctgagtagctgggacttcaggtgtatgccaccatgccacgctcatttttgtatttttagtagagatggggttttaccatgttggtcaggctggtctcgaactcctggcctcaagcagtgcgcctgcctcagcctcccaaagtgctgggattacaggcgtgagccaccgtgcctggcctgacctcctgtcttctgtttttgcccactgtcaagggtagacttcttcaaggctgtacttgtgctatcctaaagaggagtaatgggagacatttctgactttgtcagcatgctgcttggcagcacctgcctcgtttctggtgaccatttggaaatgtgtcctttatctggtagcaaggagcatttacattgatccctatgcacttaattggcatacttttattcctctggattttttttttaaagcataattgttcgtgtctacatgatgtaacatgctgctgacttttaagcaaattaacagagttcgtgctgaagcgcaagggtgcagggaaacaaaatgggagggttattaaaggggtgaggcggctcctcaaagatgtcactgcaccattcattcttgtgttcctggcccatggcaggctcattaatcctccacgacaatccattagcatgcctgtcaacccttcagagaagatgagccataggaaggcttagggatccccacttgaactgctgtgtggctctatgaacatccccaccttcctggagtgaggtggttgtggccacctgactttccccattttttttttttggacctcagcctccagcgctcctgggccagactcagggtgggggggatgcaggtgccagtgactgacacttggcccctcacacttcactgcctgatttgctttaaaggcaagggttgctcatgcttgtctgagctctccatctgtttgagaattatattgttctcaactggaacttgtaaaagagaaaaaaatgtacttctcaatttccatggaagaatatagattttctggtggggtggaaactttcttagcatgaagggatctttgtgtgatctgcgcatcagcactgaataaagaatgggtgcgccgaagtcggggaggccgactttcctgtggcttgctggggaaagtttgaactgtgtgtaagcagtgcgtggaaggaaagctaagtgtggagataacgaagggaatgggatttaatagaaacagggtgtgatgagtggcagttgcctgatgaagtggaaatcttgtgttccaaatttgtgagatccatttctgtcctctaaggaaaatgttgtatgtgcaggaggagttcatgtagttgggttagattgtgttttctgtctttattttttttcctgcctctatgggttgtgaacaaaaacaagaatttgatattctgcagtatagttaactcgtgcaaacagtgtatgcttttcagtgggatataaggtctgaaataataggattttccctagtaagtcagtttcattcctttacatgtgggttatgagatacaaagtgaagctctgtaaagctttttacgagctccctgtgttgccctcctttgacgggtcaaggcattggggttgacagaggtttctactctcagaggctttaaagaggtgcccactctggtgagatggctgtcagcatgcacgatgtgtgtgagagagcacctcttcaatcatatgcacctggctgtagcatccttgtcagccttaagagatacctccaaagcggaattttctacccctagaatcatgtgaggtcatctcaatttaagccccagctctgctccctaaattacctgagtgatcccaggtaggtcatttgctcattgttaaccatcagtttccttagctgcaaaacagagcagataacaccccaaaagagttctcatagtaaatcacatcaggcttacacaatctcagaaatgtgcagctccacaggaatcttcattacctctttaggcagtccagtcgggtttcaaatgaatcctactgtctgttcttatatggaaccacagtccctcaccctgtgttgatctaagttctctgtttctctcctccagcagggtcataaagagcctgaccagtccccctccctggagacctttgtgtgctgggtttctgcagccgttctccatgagaagggacttctggtccctgctctcacttggatgttcttccactgacttatctctcttaatgtgtggaggcagaaacccagttttcagggtctctcccctggccccttactaagtctcccttaggtacagtctaagactgcctgactttttcttcttttttttttttttttttggcagccacaacatcacatcgtcacatacagaaattatatccaattaaatctcctaagtctttttcacacctcctacatttgtgcatttctttttttgcacccaagtgtccaaatagcatttatttcctctctattgcaattccaatctgttgatctttttagctcttgactctgtcatccagtgtatttgccattgctcctggaaacttgtcatctttgaattagataaacattttatctgtgccatcgttcaagtaattgataaaaatgttgaaatctacagtactcagaaagagacctgtggcctcccactagagaccttccttggtctgttcattaatcagcactttgtagggtaaattgaacatttactaagctattcagatgtagttcatatttcttcaccttgtcaacaaagagatcttagcaaggcattgtagaccaagtatgtgttcctggaatatacatattaagaaaaaatccttatgccaagaaaatgggcacatccccaaaacccaggttattgtagtttacggcttctgacccagggcttcactttgtagcagtgtttttcttctgtttttgcctttggctgataccactgctagagtgcagataagagaatgttactaccagggggcttgagtgtcgggctatgattggctgtcatctggagcagagtgggactgagctgctcaggagaaaggtcttcaggtgattttttttgggaagctaagagcactggttttagacatcctctcctggctgatgatgggattggccttcatggggctgctgtctggctgggctggtgggcagaggttcctgtgggtgtggatggagaaatcctaaatgccgagggtacctggtcttagtagaaatcgtaggatgcctcagtgaagaagtcagggatgcggattgtcctccggatgcttggatgagcgtgcagtggaaaaagtactcctttgggggaagaggtgaatctggaggtgttagagcagaagagtaaatgcagaagttgtagcagatacaaaggctttggcaagagtgggagtgatcattgaagggaaggcaggggcttgctgggacaggctggagccgtgatggaccctcatagtaaccctgctgcattttacaaaggaagaactgtgttggggtacagatgtgccaaacactcaaagttagaaaatcaacgcagtcggttgtggcttctgcccttgaaacatcagatagtgagaacctgccactgttcagtttgcagagtggttggttgcatacagtgttttagctcttgcccactcaatacagaggttgcatgcgggcgtccacctgctccgccacctctgcctgcttgtggctgtgtgcccagagcccatttccctggggagtcagtgcagcactcctgggggacccttctgtttgtgtcctgacgaatctgactgtgctggatgcagtcccacagccacacctggtatgggtggcatctttaaaggcctggcctgtgtgtgctgtatctgcagcagagctgtggccaaacctgctttccttccatctgggttccccttggttctcggtggtggacgggctgtgtggtctcccctcagctgtccacttgcacttgtgttaaaatgcggcagaactttccctctatacttaaattgtggtgaaatacgtatgacataaaacttaccatcttaacttttttttattgagacaggatctcattctgtcacccaggctggagtgcggtggcgcgatctctgctcactgcaacctctgcctcctgggttcaggcgattctcatgcctcagccacccgagtagctggaattacacgcgcccgccaccatgcctggctaacttttgtattgttagagatggggtttcgccatgttggccaggccggtcttgaattcctggcctcaagtgatccccctgcttcggcctcccgaagtgctgagattacaggcgtgagccgccgcgcctggccttccttttttttttttttttaagagatggagtcttgctctgtcgcccaggctggagtgccgtggtgcgatcttggctcactgcaacctctgcctcccaggttgaagtgattcttctgcctcagcctcccgagtacctgggattacaggcgccaggcaccatgcctggctaatttttgtatttttagtggagatggggtttcaccatgttggccaggctggtcttgaactcctgacctcgtgatccgcctgcctcggcctcccaaagtgctgggatcacaggtgtgagccaccacgcccaccggcctcccatcttaacattttaaagtgttcagtttaagtacctttacactgctgtccaatcaatctctagaacacttttcatcttgaaaaacggaaactctgtacccattaataactcccattctctcctaccacagccacgggcagccactttctgctgtctccgtgagtctgactactttgagtacctatgagcagaatccgcaggatttctccttttgtgactgccttatttcacttagcataatgtcctcaagctccatccaggttgttgcatgtgagaggatttccttcctgtgcatgaactagagtgatgcagggactgacctctggccatgtgatgggtggttggtgatggatccaagaggtagctggtctctgaatactagcccagtccttttccttgctaggaaagtccccagatcagatagaaagcctcagtatttcaagaagcttctgttttgacaccacatccatgaagaatcacactgcagggtaggggaacagatgagtgggatttctacactgttatcagctagacttagataactggctaattgaaaagagtacaggtcacttaaggaaactggagcattgtagggcaaggtaaagtgcttttgaaatgaggatgtgaactgtaactggaatgatgtaatgtgttctacaaaatgaagccagtgagaggacaggggacacagggccgacttttatttaggacatttgcctggttctgagaagaaagttgaaagtcacgagagagagggaaaggaaggcagaaggaacttggtttttgcaggtgcctgctcagcatgggccttgccccagcttggctgtacctcacagcaccatccactggctctacagtctgtccttcggaggtttagggtgctgtctcatgcacagtgggtgctaggtggtagtgaggacagggtgtgggactaggcaggtgctgcccctcggaaggcctcatggtgaggcaaagatctctggctccgagggactctatctcctggtgtcctgcttcatcgagaagccagccacccatgggaactgtggataattagaaaggcttagaggctcttctaagggtgttttttgaaatatggagacctagaatattgggctttgggatattttaagatgagaaaggcatttggagtaactgtcagagcagataaagttgtttttatgaagatccgggaaaacggttgttacaaatacagctctgcaccaattctgcgccagtctgtttggctacagatgctttcagtggaggggacactggggcttgtgttccctttagtctttgaattcccgttaaagtttccatgtcttaagtggcgtggcaggatagaaacatctcacccatcttagtaagttctttgctgtatgtagcactctggttttaacgttctgagccttcaggactgcccttgatgtgtgcatttattttgttgatatgcatgatgtgtgggtggctctgcggcagtaaaacagttcacattcaaattacactcggtttctaatttctgttctcagagtttcctctgtaatggaaatctcttacattcttatcattgccttcagttattgaatgtgttaggtggccaggattgctgtctgtgtgaaatgggaatgtatatatacaacgtaaacatgttctgattgacacgtgaagataaagggcttaacatgaattgtgtcggtttacacttacacagaaaattctactgtaataaactgaagtgtcagtagtgtttgttatcataacattgtctttttccctcttttctgatctctgatttttcaattaggaatgaggcctaaagaaacccatgctctctcttctctgagcgcaaggagggtgtgctgagaccttgaagggcacagcatgggaggatcatatactagggagagtctgtctccaccccatttttcttctgctttgctttgtttcgtagtttcttcgggcttcttgggggttttctgagagagagaatgtcaatttgagaagtaacaggtgcacaggctttacctgcaccacactgcagataaggtgggtagggagggtagtgacaggtggtgtggtgggttattcagttctttcctagggcagtgggtctcacagggtggtgcttaggccagcagcatcagcatcacctgggtgcatattagaaacaaattttggggcctcacctcttgcgttttaacagttccttcaagtggtcctgatgcatgttgaggactttgaacactcctcctacaagcaaagtgaagttgacctcccacacacttgtctcagtctgctttctagcatctgtcccattgcctttgttgttctccccgccacacgggctgcacccctgggattcccccagctgccaccaggcatcagctccagctgcctcccagggtgtgctcctgcctctgcttggagtaccctgcctcccactcttcctggcaagaccctgctcatctttcagggtcgtctctgctgagaagtcttcctgacctcctcggagatagggagttgtggggccttgtctttatgttcccagggttctgtctattgcgctattaaaactttttttttcatttaatttgccacttgctagagagatggttgttctgccttcgttgtgcaaaattcagtgatacactaatcctctcctaacctcttaaatcattttgactttcacagagtgatagtgtctagagagggtttttgttgtactaagttattggttccaaagaattcattttaagaggagtaaagaactactatagtatgccgcttactgagacaaaaccgacttctcacataagcccaaaggttttgttatgttggattttaccattagagttaaagatgatgattggttcactaatgtgctttaccttcacagtgtgcctgtagacctgtagtaaaagaaggctaattatgtttcctgatgtcttttatttccaactataagctaagcctatctcattttttttttttttttttttttttttttttgagatggagtctcgttctgtcacccaggctggagtgcagtggcgtgatctcagctcactgcaagctccgcctcccgggttcatgccattctcctgcctcagcctcccaagtagctgggactacaggtgcccgccaccacacccggctaattttgtttttgtatttttagtagagatggggtttcaccgtgttagccaggatggtcttgatcttctgacccgtgatcctaccgcctcggcctcccacagtgctggtattacaggcatgagccgccgcacccggccaacctatcccatatttttaaagaagagttgatcaagtagttacccattttaactaaatggataactataacattctttaatggaattgttgacagagggataatcagtgtttttgctaattcatgccaccctcctttgttgtatgttagtaatatttacattggggcaacaaaatagatcagtatttccattaatgtttacttaataacagctgctaaaaggtattactgtttgcagtaacacaaaagcacttacctgattcttatgccagcttctatagggtaggtagtgacagcccattttgcaggtgaggaagatggggtttagaggtgaggtgtgtctgcctgagagcaggagctggtaaatggcactctgggctcatgggagtcacgctgtttttttttttttttttttttcctaggacctcaaggttgtgtctaagacataatttacagttctcgtgtaggtcttccaaatacttagctacacagctttggggcgttttctcagccaaatgcttttctttagcccttctcatattaacatttagttcttagggatttattttcaaaatatatatagcttgtatatgccattcacctaagttgttagagcagacattctgcctcttgatctttagaaaatacctaagagtattttgttaacagtactcatttcagctgaaagactttattttaaaatttaatttaattttattattgttttttgagacagaatcttgctctgtgtctcccaggctggagtgcagtggtgtgatcttgacttgttgcaacgtctgccttgtgggttcaagtgattcttgggcctcagccacccaagtagctgggattacaggcgtgcaccaccacgcctggctaatttttgtatttttagtagagatggggtttcaaactcttggcctcaagcgatctacctgccttgggctaccagagtgctgggactgcaggcatgaaccactgtgcctgacttttaaggctttctttaaaatggcatcttttggccaggtgtggtggtaatcccagcacttctggaggctgaggctggaggattgcttgagcccaggaattggagaccaacctgggcaacatagggaaaccctctctctgccaaaaaattaaaaaacaaaacaaaacctaggtgttatggtgtacccctgtggtcccagctgcttgggagctgaggtggaaggattgcttgagcccaggaggtcgaggctgcattgagccacgattgtgctgcagcactctagcctgggtgacagagtgagaccacgtctcaaaaaacaataaaaaataaataaaatgacatctttggagaagtgaattctacccaggtaccaagcccctgcctgcccctcccaactcccttccctgactcccagcacccccatctgttttggttctgctgttgccattctctggctttggggactttgctgaggccccactgtccccatcttccagctgtaccctttctctctgcttccctgcttgtcttattctttacagggctgcctgggatctcacattccaaaagtttttgggtttgtttttggatcatgccaatatcggttgctttgagaagggagaaagggtattttgcattttccttttaatcatcggtgagtagccacaaagggtgtgtctctccctcttgtgctgtgtttactgtttactccctcggtgcatgaattatttcatggcaccagtggagcatattttcttctctttcctgtttgtggcttgcgcctcctgaacgctgctatcattcatggtccagcttggttttctttttcactgtttctatcacaaaacctcctgaagaccagtggtgtcagtcataggctccaaaacagctggttcctaggccctgcctcgtgctctgtggtttgggcttgtcttttcttccagagtaagtgggtagcttcttcctactttttttctcttttcttctataaatgggaggaaaagtgtgaagtatggagactgctctttcatttgaaggaaattcacagttccagctctgtagtgtggcctctgttaactagtggtcaacactgactgtggaaggggggccagatggcaaagtgaagcagattctttcctcctgtctgcattttgattgcagtatgaagttcaacttgcttcagtctttgtcttcatgttgtttcactaggtactgaattttgtgatctgttggaaataacaagtaaatagatgcctaacgctttatacaggttgagcctgtctaatccaaaaatccaaaatccagaatgcttcaaaagtttcagcttttggagcactgacatgacaccacaagtggaaaattccacacctgacctcatgtgacgggtcacttttcgaaactcaggcacacgacacacagttaatttagtgtccccaggggaaaaaagaccctcccggcccccttcagctgtgatgtgtcttttccacacatgcccagattccctcagacacctccacaaagggtaataaaatggttcgttgtatacaaactttgtttcatgcacaagattattaaaaatatataaaatgactttttagagaagcgagaagagaaatgagaggtaggggagggagggaggagttgggggacagttgggggaatagttgaagctaaggtgtttaggcagagctctgaggaggtgacgtttgagtggagacccagatggctagagaatggggcagcctcctgaaggagcagaagcactgtgggcggcagggtatcacagaggaggagctcggtgtgttggaggttggtgagtcccgtggagtcttgtcagatggtgttgggacagggacggaccgtgaggaggctggatcatggggaatgtgttgctttaggccaagctggagttgatagtggctcagatcagagctaaagtagtggagacacacagacattgaaagaatgatgaaattcactcattctgcgtgtgtcccatgtcatgtgtccgctgcacaccaagtactgttttaggcactggtgatataattgtgaaccaactggagctgcggtgagagagaccatgaaaagaagggccagagcggtgtcctgcagagggtggtgtaccttgggagggaagtgtgtagggttgttgaggaacagcgtgctgcacagggaggaaagacgtggggcagcattgtgggaagagcaaccaagattctcataggcttgggagcggaagccctgaggtctgttgctggactagatatgtgaggtgtgagaggagagaagaatcaggaatgactctttgattcttaacgtgagcaactcagagaatgagagtgctgcagtttacaagcttggaaggtggattatgtggggggatgagtgagttgtttgacacctcaatggatatactcggatgtatacgttagagctcaaaagagtctgggccagtgacatgaatttgatcatatctagagtatgagtggcacaggaagccacttgtctggatgaggtgacagaggaaaaggttgaggatagcaaccaacatttagaggtaaggtagaaggcagagcagtgtggaatcagggaagccgagaggaggaggcaatgccaggtgactggaaggtcaagtgacacttcgacagtgtcactgagggctctgctaggagctattcggtgtcataatggggacagaagctcagtcggagtgggttaaaggtaaccaggaggtgagggtgctgagaggtgggactattgacaagccttgtgtcaagttttgctatgtaggggctgaaatctaatgtatgtgactgtgtataagtgacttgacttccccaaatctgtttcctcacctttaaaatgggtgtttgccaagtgctggtttctgctattcttttctctgtcttaggggtgtcattttctctttggtaaaacagaagaattagatgatatgaagtttcacattctaagttctcaagctttgcccactcctcagcccttgggtccctccacttcctcttctcttcgctatctctgctcagtttctgtctttgattgtaatgtaatgcccagtgggacttttcttctctccctcgtctgttcacttattccgtcctgcactgggccaccagattaatcctgcaaaaggcctcacatgggcttctctcccgctcaggagccttgtgggggctttattcctctgagatgaaagttcttatccccacatgtgatcctttatgacttgggtgctatcaaattcatttcctcaactgctcccctcttcaccctgaccatcagatctgctggcacatgggcataccttgttctgcattgtctctggcctgtgggatatttaccgagctttaaatcctaggcaccctttgggagccggcctgtgtgcagagctccccttagcacggtggcacaaagcttggacaccacctcttgtctgtcctgcttaattccattcacatctagagtggactcgctgtgtgcacaccactgaccacctgcctcatgtgacagttgttcctcatgggtcttagctctttgccttcaccatgagcctcctcagagggcagggcactgcctgttggcatttctcgtggtatcatacatgttgggtgcttcccaaattaattacatcagtcagaaaacttcactctatctgagaagctttaatagtgtacttgggattattaaatcctaaaaaaggttatcacaaagagttttcttggtgtgtgtctgtgcttagaatttagaaaataagtcatccagtattgaggccattttatgaaaagcctttaaaatctgcaaatgcgttggcccagcacttccacttctagggatttatcctaagaaaatagtcttgggtatctgccaataatgttcactggagtgttgtttataatgtgcaaaacaggagctaacctaaatgtccaacaataagggattggttaaaaaaaaaaaacaaccctcatggtgtgtattaatactctggaactactgtccccttaaaatggtgatgtagaaggacatgtattgacctagtaaaatattaagtgaaggaagtgtgtttacaaatgtcatttttgtctgatttcacttaccttcatttatagagagtggataattggcatagatagtgttaacattgtttatcgtggaatgttgagatcgttgatgatttttactggttttttttttttggttattacctctaaactctgtaggaagcatgctttcttgatcaataaaacttaaagttggagtttatgctgcttttattcataaaaaaatcacgtttttaatcttgttaggttatcctttatgtctacattaatgcacgtgtggagagaacacagtctactcggcttatgtcaaatggtagtgggaagcatggaagcatgcgttttttagtccccactttacaagtcacagtgacggttctccagtgtagagtagattgattgccctgtgtccttcaggcagggtgcagtagtaagttattgatacttggctgctgagctgtcgttcaggccttggcaactgacgctctgcagaacggaccaggagtgtgcggtggtggagtccggctggcctgggttgcagatttaactttcgcctctgcctctgtgtgcctctgggctgtaagctttagtttgcacggttaacggggatggcctctcccatggtcggttggagtgtgttgcacagcgtctggtccagtgttggcactgtataaatgccagctaactggttagccacctaaactgtcagtctgcaacccacagctctgcagtgaacaattgaacctcatttctttaataataatacaggattcctgaaaaccaactgtattattgtttggaaaatagtttaaaaattatttccttctaactgagacgtttaccctcttgtctcccttcagtctgcgggccaggcatcgacatccgcaacgactatcagcagctgaagcgcctggagaactgcacggtgatcgagggctacctccacatcctgctcatctccaaggccgaggactaccgcagctaccgcttccccaagctcacggtcattaccgagtacttgctgctgttccgagtggctggcctcgagagcctcggagacctcttccccaacctcacggtcatccgcggctggaaactcttctacaactacgccctggtcatcttcgagatgaccaatctcaaggatattgggctttacaacctgaggaacattactcggggggccatcaggattgagaaaaatgctgacctctgttacctctccactgtggactggtccctgatcctggatgcggtgtccaataactacattgtggggaataagcccccaaaggaatgtggggacctgtgtccagggaccatggaggagaagccgatgtgtgagaagaccaccatcaacaatgagtacaactaccgctgctggaccacaaaccgctgccagaaaagtaagaatgatgctgactgctgctttctctctgcctctctctctcctctcctcctccttgacctcccttctcttctgagtgcacgagttccgctgggcagggtgcagtcgtgttgcatttaggacgtggcatgcctgctgtgcggaagtggttcccagtgggggtcttggttggctttcctttgcatctgggactcttggattgcgggactgtggcgtggctggaggccatcatggctgctgtcaagactgttcaaatcacatgttagaaataatccagcacactcctgggctagacacttgctgaccttcagctttgaattcctgatgagaaaggtgacctggtgtgcttggaagtccctgagccttggcagctgggggctgcttatgtgtcagctctttcatcctttgtgcgaagtgatattttttgttctgcaggacttccttagtttgaatggacttggaatatggttaaataaagggaaggtaaagcactaactcatatcctgtgaaagtggtccttaggtcctagtgatgatgttatgatactcaggtgtcctggttatgacagagcacctggcccaggtgggagacctctggacccatttctgcaagtcccaggttcaggctgtacttgcaggtagctgtgtagcagggtgcatttttaaacctctgggattctgttttcgttcttttatacctgtttactgaacagttgtgaaaatcttaagatttcacgagtgaaggaactttggaaagtatttactgttctgggggtcagatggtggtattttgaagcttcttgtatatttatctgcaatatgcttattttcccttgagaataactgagctcttgccttcatgtgatcagttccttaagaaccaggctgtttggtattaaaatgtgactctgagccttcaccttattgcattcagcaatagttatgtatattggctaggaagcttttcctcactggtttgaagtcagtgtgttagctataaatagctattatttaagtgttggcccagttaaagatgtaaggaacccatgttctctagttatgaagaaccaagaaaccccaaattgttagacttgcctaaaataaataaaaggcgagaccccacaggggtgaagtgtgtaaagtaaataaaggacagacctcccaggtagcccttcagttcccgttcaaccagtcctgaggcaggaaaaggatctgtgtaccctgatctgccacgcacttttctattctgcagaattggatcagtgcgtatgtgaacattgattagtgagggcaggggtcccactggctgcagccagtaccttgtagagctctgagaatgcagtcaggccactttaaggttggctggagttggagggagatcttatgctaaagtcacttgtgtggttgattaaaactgccctatcattaagttacccactggtttgagaaaacaacaaaatatattttttaaataaccttgacatttaaaaattttatctgaaaagtaaaaggtgttatcaagggaggcagcatggagtagaaaagagatgttgaatgtggtgatgagggccaggaatgaccttggatgggccagcccttctgggctgtagttgggcttttttaggatatttctagggcagtccagtacatcccttagtggtgatcatatatgggcatgaggatgttttgaaaactcataagctctttagagaagggaggtgccatatgaaacgtcattaagtggagagttgttcacgaactaggtaggtagttactttggtcttgccataggtttttggctgtttctgatgagctactgattgaagacccctggggtaggggtgaggcctgcattctgggtccaagtctaagagtggcgactagaaatgagcaagttatttaaattgcctgggccttggtttcttcatatgtggaatggggtaaagcctgccttcctcatagggctgttggaagatgaaaaggaggaaggaaaagcaccgtgaaaatgttaacgatggttagaaggtgggctctgctggtgacagacagagccttgatatcacctgttggttggtcacctgcttccccaaggccacgccctgcagccttctccttgaccatcccagccctgctgatgttccttgtgatttcacaatggagtacttatataaaattggtaactgctttccgggaaattgacttcccttccccttgtcctgaaaactcaggcatgggcatatttcttggagattttctagttgaatcagaacttcctcttggtttgcgtagattccatttagacctgcattgtccagtgtggtagccgcttattgagtaagccacgtggcttattgagtacttgaactgtggcttgtccgaattgggactgctttaggtgtaaaatatacactagatttccaagacatagtatagcaaaaactctgtacaccatttcattaataattactatgttgataacatgttgaaatataacattttggatatattagattaagtaaaatgtgttcttaaatttcacctgcctgtttcctttttattctttttttttttttttgaggcggagtttcgctctcatcacccaggctggagtgcagcggcgcgatctcggctcactgcaacctccgtctcctgggttcaagcgattctcttgcctcagcctcccaagtagctggaattacaagcatgtgccaccatgcccgtctaatttttgtattttaactggagacggggtttcaccaccatgttggccaggctggtctcaaactcctgacctcagatgatccgcccgcctcagcctcccaaagtgttaggattacaggtgtgagccaccatgcccgactctttttaattcttaatgtggctacttgaaaatttaaaattacagatgtggcttgcattctgtgttggtaagctgctttagagcatttcttttaacaccaggagttcttcccctcatcatctttttggctgagtcgtcactgcagcgctcatagccccgcatgtacctctccagccagaacccttaggaatcatttggggagctccatgaagggcattgagtccaggcagaatggctaccttgagttcaacataagcattaagatggccattcgaaaacattaagcacagaagaatcccattcaggtaatcttctgttggctggctgtagaactacggagaacatctggagaaacacgtcaagggtgtgtgtgaaatcgttgagcctactcgattttgtcgtgctgttgcgcggttttcacttggcactgtcctttaaactccttctgtgccgtgactctgcagtgtctggcagcgtagtagactctactccctctatggacgtgatccctctgtgggttctctgcacacttctgtatttctcggttctttttggatttaggagtggattttatacatttttgagtcattcctaaagagcgattgacccttaaagaactgtgtacagtggtttcctttcagtaagaacatagttgtgtggcaccccctgacatgtggtgtggttgattcttcttccttgtcttccaacgccaccctcttatgagtctcttcctacccccacaggtgccgcttctctgtctcccttccctcagtctggcttttaacggtggtctcctgacatagtccattcaggctgctgtaacaaaatcccataccctgagtggcttacacacaacagaaatactgctcacagttctggaggctggaagtccaagttcaaggtgcttaccagattaactgtctggggagggcccacactctggttcacagaagcaccttttcactgtcttcacatgttggaaggggcgagggattttttttctggcgtcttttttataagggcactaatcccatttgtgagggctccaccctcatggcctaatcacctcccagagccatcatactggggattaggtttcaacataagaattttgaggggacataaacattcagatcatagcatggctggagttctgtcctgggctctcttttcactttccttgttctcatctcatccactggtaactgcattgcctcctgtctccacctaaacttccaagtatctccagcccagaacccttttgagtccaggacctgtcattcatatccatcccagaacccttttgaacccaggacttgtcattcatatcagaccaccacgagcatttcactacagcctctgatggtcttccctgtttcctcacttttgcctattttttttcttttctattccctcttaagtgggccacacttttgttcccctggttcttatgtcaggaatgtgggtgtcctttggacacttccttctccagttggataccaggccctttccctcccgaatggaatggaaatgctgcttcagctgtgttcctctgctcctcccccttacagcagtgacatagcctctctcctgctattgtgtcctgtggctccaccgagcactggggagcttttcagtatgcactttttttttttttggagaaagagtcttactctgtcacccaggctggagtgcagtggtgcgatcttggctcattgcaacctccgggctcccaggttcaagtgattctactgcctcagcctcctgagtagctgggattacaggcccgcaccaccacacccagctaatttttgtatttttagtagagacggggtttcaccatgttaaccaggctggtctcgaactcccgacctcaggcgatccaccggtcttggcctcccaatgtgctgggattacaggcatgagccactgcgcccggccatctagtgtgcactttggactgatgagctcccctacctgaaatcctgtagcaagtccctataggataggcatgtggtacagtgtgaagctcctgagtggtcaacagctaccccgtgacaacatgccacactccatgtgccactccctcccgcctgcctgctgtgtccttggccccagtggtgctctcccgtgctgaccagccggcacggctcacctggccgaactctagccttgccttttcctctcaaggatgtaaaggctctgcagatttcgggaggcctgtctcccagcacctgatgggacactttttgccccactgtaaattctgggtgtatcctccactgtatgctgtcaccccaagggcaagcactgcatctgcttagtgaaggatttattgttcggaagatacattttccccttgagcagagagtagcgtatcctggcagtcttcggtgagccagttgtaccaggattatgaaatgcagatgtttactgtgtcattgttgctgtcattgctactgaggagtactgaccagaatcatctgcaactcttagttggcagagaggaccactatggcgggtagctcttttctttcctgccattgtggggatgattccaggccaaagatgatggagaagtatggaaatcatctgaaaggttgaagcttggcacgtgaagccattcatgactttgtaaggcagttttgctgaaggccagttctgccctgggagggacggaggtgaatcctcctgagtacctgtggttttcttacttcctgctgaatttacctaagtgcctgttgtttgcttgctgtggaggctttctggtatttcatttcaggtgcagatgccttcactttcccacaaaaaaaaccccaacaaaacctaagaccttactgcaactaagtctccaagtactttttaacccattgggatgaacagcctgtggtctgctcagatcaccctgagtgcgtgtgagaaggcctgggctttgccaggaaatccaggaaggcagggccgggctgtgttggaagctggcttagctggtggggcagccttatttcaattaaaagggcattgactgggagcagcagtcctggagtttgttgcatttcctattgccctcaaaatgagaaaccaggaaaatagcagattggagccttcgagaaggcagtaaatggctgtttttattgacaaaaggaaaacattttactgccatctcactgatggcatctcactgacttaaaatgaaggcaggttgtagtaaaaaaaaaaaagtctacatttttccaccgccacgttcttatatccttgtttgtcagccactgctcacaagggcagtgttgtcttgcggagtagaggcgctctccttccctcgttttcctctataggttggtgtggctgacctgctagatcaaagtggaggacctgtttaagaatgtgtaaattgaaggctgggcgcagtggctaacacctgtaatcctagcatttggggaggctgaggcaggaggatcgcttgagtccaggagctcaagactggcctgggcaacatggtgagaccttgttcatataaaaaaatttaaataattagctggttgtggaggcacgtgcctatagtcccagcactttgggaggctgagatgggaggatccgcctgagcctggggagatggaggttacagtgagccgtggttgtgccactgcacttcagcctgggcgacataatgaaatcctgtctgagaaaaaaaaaaaaagattttgtaactaagttttatggctagctttgagaaaggaaaataataataaaaaaagaatgtgtaaatcacctgctggatggggggaagaggggcacattgtctttgtagtgagacttcactcatgtgatgtgcagtatttcatcttaacattttttttttaaacttaagctacttgtgaagagctgagatgtttctgttaagcactgtgtggtctgctgctggtcttctgcaggccactgttccccagactgctaagacgatcatgacacaggcttgcattttcaggtggactcttgggaggggcttgtggaccctggaggagaaggcagccaggagaggggcatctggctttgtgttgttggtaggaacttgtctcggttgccctggaaggcctctgctctggtcagctgctcccagtgtgggggtgatctttatttagaagggggtcacatgcccccaggcctcattgctatgccttttatagtcaggcgtggagctcacattctcttctgcctgattgccgacgcttgttgccgagatggtgaagcagtttgtgtgcaggttccctgggacctggcttagcccacctcatttcttggggcgtgtgccttgtgcctcaaagactttgcttttggctaattgtcattagtgatggtgtcaccatcctgggcctccttcagaagtttttaatagggatctcgtctaagagaccaaaaagctttcagaaccactgacttgtggtgatttttgcatgccaagtatttggaaaatatctggagccccttcagctctcaccagttaaacctatttgtacaattgttctggtttcttcctgtgcttgaaaagcctctttctttgttgcgttaatacctctgtcttgctttcctcatgtgtatgccagtgtgacattctcggcagagtggggatgacgtggagcgtgtgggcccgtggttaatcttgtcctgaattgccttgctcaacttgcgtgtatagggtggttcaaaagttaagtttggctggtggtgaagttggaagcatcacttagaaacacgcctcctttgggcatatggtgtgaatcagggactctggctataaaaggtggggtctctgagcaccatcctggttggaatgttcccctgacttggaggtagcgagagacagccaaggtgtttgttccagggaggctggtgggtgggagatgggatttttctgtctgtggcacaggcagtattaagtagagcaggctgtttaaatcacattttaagtaaaaaccaaagtgcacagatgatctgcagaacttctgggggataagaagctgctttcctcgaagaagttcatctccaaaccagcgcccatggctcagcagccagcatggcagccccaggggtacatgggacttgggcatgtgaggctggtgagggacagggacagctgggtccagcagtgcctttcctagggacggttgccacgtcacctgtctgccctgtacttccatttcctttctttgaactcggggggcttgcatcggactacctgtgccgtttcctcaaactctaaaattgagtaagttactgagggtttccgtggtctgctctgagaagatttcttgcttcctgatctgcctgtgtgttcgtgttgcttggtctctctctctgtctctctctctctcctctttgatcctagtacatacaggcaaggtatgcagcatttaaaatgttcataactcatcaaatggcacactgatcatcatgtataatttgggaatcagggtttaagaaatttagagatcatttatatggaagaaggaaccccaagtagaaacccaaaatctagaccattctgggttctaatctgtacctgccactggctaacatatggctttaagctggatgttacaatgagagctggagtttcgtctgattgcacatagccttgcttttctgtctttggaaaagtagctcactgtagagccctggtaaacgtttgaactgcattgcgggagtaggcagaagaacagaacagtccttggagcttggtaggaggtgtgagggcttatgggggacagttgtcttttcaagtcaaggaggaataagggcttctggggccggtggaaagggtgagtcttaggcagggaaggtgaccatccaggttagatcacttcttctgcggggtcagcttggccgctgttaggttttcaggatgtcatggggctggccaggcctcacccctgatatccctgagcatctgttccttacaatattgtggagtccgtgggggcagaagctaccatcctgtgcctgccctcactctcagtgtgactggtcttcaggatgtttaggtggctccacatgcggatgtacagctttcccctgcttgttttccccatggcatattaacagcgagatctgcaagaatacatcattttgtacagaacaggatgtatttcttttaaactacgttcctgtgtggacaagtggtatcatatgcaaaggtttaaggaccgttgatgccttgagatagtgccatctgtttgcctcaggtatgtggtgctaggacaaagctgccagacctcaccttccttcagtgagacaggaataggacagtatttgaaaagcatctaacatgtttccaagcacataggtttttggtaaatggtggcagctgctgctattttttttttaaattaaactatctaagagttgcattctaagaccatctaaaattctgagtcttaagctgtgttgactatatatgttcactaccataactaaatggtccttctgtattgcttttctaaattgtagaatttcaattattgtaaatagcgggccatactgtaggtgtggttcttgctaatttgattcgtactgttcaaattcttgtgtctgtccagataaactgtatctttacagaacattcagcgaggtacatatgtctatatcggggtgccagtggagtcaccctagtcatatgtaaactctatttatttggttccgaaactgaatttattttgtttgcaagtttggtatttgggagcatttaagaaatatccatagattcttgtatgatactgacattaaatcattaaataccatattttttaaatgcctctgtctgtttgcatggataacattaaagtggttagagtgggcacagttattggtaaagattacaaagatgtgcatttttatgacaactttaggtctcacataggtagccaaccatctgctccaggatgaagcatgtgcctgtttatcctcttctttggtaacgctaggtatatgtgtgcacacgtgcacgtgtgcgtgtgtgtttgtgtatgtgcgtaccactttattctcccacccagcctcttctcctgttttgtttagtttcattttcctcctctcacccccattgcaggaaacaaacactggctctctgtcctcccttaggtcttccttccgttcaaggggatcaggtgggtgggaaaatgttgtgcaggaatgccaggcctctgcccgaagccgggcttctgtttcatctcattattgaacagaagtcgctttttgtttctttgccttggtcacaaacaagcgcccagtcctctcttctttcttcctgccatttttcccagaatccatgtgggatgggaacagaggcagcgtatttagggactgtcggttgcttgatacccatggccttgtttagagaagctgcacccactgccccaacgtgtagctgcatctgatttgtttttgcaagtcctaatgaagggacctggatgaagttagtgaggttgccgttcctggggttaatgcagagtggcccatggagcttagccacccttcatgcagaaggtggggctgagggcagccagtgtgactgaggctcgctggcccaccctgagctgcttgtgcccatggggcccctggggaggagggcccagctgcagtgcgcatacatctgcccttggcagcagatctgtgaacccaggctgccattctggatttccggatagatgcaaagtgcttggacgtgttttagcagctgctgagaccaggagttgggcttagtagtaaaaagggggaacaaaataaaagaagatcaggagacaaagagcctacagtacaaaaaaggaaagacgaaggttgatattattagaaatacttcctgggcagccttactgtttgaattaggatcacccccacccccacctcccagaggtattagttgtaatgcagagacaaatggaaactagtcagatccttgggtcctagaaaagaccagctttgttcctggggtggtaacctagtacaacgtttccgttcctatttcttgacctctgaatggccccttctgctttgctaagtagatgatattattaggtgcttagactattcttcagataggatgtaaggatatatttttgttctcttcctcagtgaacttgaaatgattggattattttgtaatacgtcgatactacttttagaagcttttgaataactgtgtcaaagaagctttagaagaggttttaagcaggattgcagagaatgtactgagtgtgtttttccactcacaaggaaagacagcagctgaatgcagaagtgtgtgtctggttctaactctttatcacttcagggactgtccaggcagcaccatccgttgggtctcctgcccttcctcctcccacccctgccttacccctggccattcttttgtgaccagtagtcctttatgaatggaattctgagaatgtataattttctcagaagaatgcttctttagctcaccaaatatttcttgtttgctgaggggggaaaaagatcctccttggaaaagtcactgggtgccaaaggtgggtgatgaggagagatgaacttctgggtgtgcctagcaaagctgtttctgttgataggcgattaacaaaacagccaaacttgacctaacagactgccattttgagaggaatttgttttgcaggattaattggcttcgaggtgtactggtggctgtgcagtgatgacggctgtcgtgcctcctgtgtcttctgctcattgtgatgcagggcaagtgcttaggcctcagacacaggctccctgaacttcgtgttcagtgctttagggtggggggacttgagacccttgacttgactcggtcccactggaaagcttctgttgcttatttgggtaaccccaactctatcttattgggcggtagtgttatcctaattcttggaaatactcagtgtagaataaagagctgatgaaaatgtgtaagaagggagtaagtggtcattagagagaaatggtaattgggatgatgctctgaccccttcagcaaaaaataaaaggtgaatggtttattatgagctagttcagattctgtttttggaaatgagcttggttatacatagtgcatttgaaaagcgtgaagcatggactttcagatgccagctcctcagcctcctgtaactccagtcgcaaaatccctccagtgtatctaaataaatgcaaactcatcagtgccttaccattataaagctgggctggagaggcaggtggcctggagaatcaaatgacaagaagtatagggagcagcccagcttcatgatcgggggaatttgcatgaaaattgtgtacacttaagcaccattgtctattgcagaaagcacgatctggcctcttctactgactttccttccagctctgagattcagttttgaagacaaggttgttggggacctcggatagatctgttggccgtggctttcagtaaacactactagagactgaggacatgttctagacttggaatggtatgaagcagtcgaactttttaggatgggccctacccttagggactgcctacgaaactagatctagaagaggaggctgtggacattaggaggtggctgcaattggaaagttccagagagcttactgagggataacggatgtaggacaggaggctggcaaagcacctcagtgatagggcagaaggaaataaagtggttagggaaggagttgagagcaggaaattcaggtaggattgatgttaagtcttagatctttgaagtgactttctctggtctggcttttgctgttaccaaagtgaattattcataagtgcatatgagaaatgctgatgtaactcgattatgtggaatgaatttaaattcatttaagtcattcttttccactaaagtaagctttccctcatccagaatctgagcagcccgatagccaagcaggagtttccttgtgccatggccagtgattgatgtcttcttctatgatgctgctgaaatgctggggactctgaagcgcagctggagtgatcaaagcaaaattaaaatactttctcagtggtttgggagttgggtgcgttctgctgtattttttggttttcggcatctgggtttggtgtgcatgcatggtgagctctagctggagcagacgttacctactgaggctacgctcttcgtggtttctccttaaccatcacccacttgatcttccatgaagccccccaaatcttccttactgaggactcttgcttccaggttgcttttgtgctcatccattgctgggttatttggtcagtgatgatggtttctctgtactttttatcagtaggttcagaggaccttgtttactcctcattcatctctctccccaaacagttgagaaaccacttgtgggttaggactcatgctttgtttataatgtttgattctccaacctcacagctaatgggaagcccgtggaggagatactctgtaaaaatccatctcccatgtgggcttgaccccacttagtgtctgagtggtttggtcctcatagttctcttgggggaggaggaagggaaggaggaggaggtggcgatggcagtggcagcagtggtggcatcttggaccagagtgagaaatcttggaccagagacaaaagaggtcttctctcagggtagtgcaccatgagagggagcacctgtttacattttgtatcctggacaccaatcttgccttgctctggtgctggccctgagaggtgcaggaattttataaagagatttacaaaacatttttggatgaccaaattggtccctggttctagctggaatgaataaacaaactaaataacagtagagtgtgagagtaagtgtgtgtgctagagaatgtgtgcacatgtatggcctaggtgagttcttcactttgctgacttgtgaattatttggggtcctatggtcctccccatcattcttattcatgtcagtccaccatcattaaggaagtggaagcgaacacattgtgtacatatcactcccatagagagggagactggggaagaggtttgagttataagtcgcacctaggttaggtctggatgtgtctttgcaggtttccttgctagttccttggccagagtttccatcgtgtccctcagctgcacaattaaggtgcccccgttttgtgcaagtctcatgctaggcagtatgagatgacacaaactaggattctgttgtgagataagataaaaacacttgacatttaaaagagagagacaacttatgcggtgtgacgagacactctacgacttttgccagaagagaaatagaggcaacaagtgctaggagctcagaggagggtaagttccacatttggaactttggattaaaagaatatttgggtctggttgaaatcgaggcctttcatgagaaatgtccacacttgctcagtactgtttgccgaacactgtatacaaggccctcgactcgtgaatgagttgtaatgcaaaactttgccaggcatttggaatgtggagtatactattttgtaaagatgaggtctgaatggtggtttaggtcccaggccagtgtccctctgccccccacctccatatgtgccctcaagccggtttggcttagacattatttatctctgactactgtgtacagcttagttccatggggaggaaaaggcttgatgaaccctaccctggaaggctggtggctctgttttctgatggatgaggtaggagtggtggaaagctggtagtttctactttgtgcctgtttaaaaagccccctctgaggccttagcacttaacagatgttcaggattgggggaataaaggagctgcctttgcagaggtctgtgggcatgcagtgggtgagagagcaggcactgagtgccccgagtttcctgcctgtgtgggcaggaggattctcagtggaatcaggagcatctccgcctggtgctggaggaggtgtggagttgaaggtgggattcttcctcttgaaggacttgaatgagtttctgtgtggctgaacagaaactggttcaacacccatgtcatgatttttgtgaagcgaggacttggggtcccaagtctaggttttaggttccctgctgtaacccgtggccaccgagagagagttttatgataaaatgtcagcaaagtacctgacaacgtctcacgctagaatgagtttcgtacatgtttagttccctctctttttattccacgctcccccaccccaactttaaatcagaaacgtgagggtgctgattgaagctttttataacttttcttattgagaattgttctctggagttgtctccaagaacaaaggaattccagacgttcttcttctctccttgtctcttctgtcctccagtcaaagaaaaactctgcatatgatctttggcctggagaaatattaaatctatgttaagtatgcagacatgaatgggcaaatgaaggatttgtggcaaagaagatctgccgaaacaaataagtcatgtaaatgggcagagggaaatattaaattgattgcatctttcagctcctggtacttaatgcaaagataaagtagtgggaaaaggttgtcatttgaaataatggaaagatgagggagttttgaagctagctgggatttttctgcctgttaatagagtgacttggattacagactataaagataaagagtagggccgttgcatttagtatggatcatgatgctgattgctgtctgagcaacctctgtactaagggaggagaagctaacatccccgggcctggaagatactggatactagctcattaaactcttgtgagaagccttcattagcattatgggaagacttgctgtatctatattatgaaggcatttagatttttttttaaatgcatgttcttaacattttttgtttattaagtggggcagtagattaggactgaatggatttgattctctcatcctacatagtgtgcccagaagccagaaggtttcccagaatttgtattatggcagcgagggcaaatttaattagcagataggaaaagctttggagcagtttaggccaatccatttaattgtatcagcaattaatattttgagaaaatggaaataattaaatttacatttcttctaggactttattttgttatcctttaaggttattgtaaatgaggagacttttgaactcacagactaaagcaaactacaccagataatcattaactttttctattgtgtgccacccttcccaaccagattgttccatagtatcacttatgaaccaagaacctgtgagcttgcaaaacgcatttttaaggagtctcaacttttctgatttgtgttaaagtttaggtgtgggtcccagaaatgagtttcatggaggggagaggttgtctctctgggtgggtaatacaggggccactgggggctcactgtggctttctggcacagacatttatgaagcaggggtgactaaagtgggagagagcagccagttctccagcagccccagtgagagctctcatggatctgcctattgcactggggtaggagccatcaccgtcagcttttctctggcccacagtgccattttctgattaagctgagacctctgtaatagacacgttgtcattttttcttgtgtctaaaagtttgcttgactgcagtgggtctccagctcagagcaggtctggctagagaaaacaggaggtgatgactggagcactttgcccttatggaacgtgctctgatgtagaaagcaagaggattttccttgcagtcactgaaggtaccttgtgtacacagaaagaagacagagggagccccggatgcctcggtatccctcagagccggatccttcagacctgtgcagtacctgtggatttggttagtcgatgatgcgctgccattaaaacaaaggcatcggccctggaatagagaagttcagtgagaacctctgtactccatgggcattttctaggaaataatttcacctgccctgtgtaattctctggaagaatcacagtgagttggaaggaaacttaagacttggaaaaggattgagaggttagcccagaccacaccagggctctgaaggcccagctggggttagaacctgggacaccctccagcccactgtctcctgttccctggccatttactgccccactcccctttctactctcaggggccctggatctaatgaggggattcgtgcagtttgctgcactaatacattgcaagtggtgccaacctaaaggtattctgatggtggaatcagagcagtagcatcttattaggtcagaatctgtatctcctcttccaagatttttacatgatttagtgttttctgaattggaaaaaaacaaaaacaaaaacacacaaaaaaaccatgtctaaatcctagcatttcatcccatgttgatgaaagggcatcttttttttcccctaatctgtggttagaactctcagaaacttttagaagatccctcctatgttttggaggtttgcagatttgaaccccagttcctcccacagtgcttctccaactcctggaatgaggtaaacctccaggcagcctgttgacccaacccatgcatgccggtctttgggactcctagatgtggaccctggagtgaatagggatcaggtgggaaatgagttcctttgatcaagatccttgtaccagtgaactgaccccactccccgtctggattcctgtggtgattaccctctgtattagtctgttttcatgctgctgataaagacgtacccaagactgtgaagaaaaagaggttttaattggacttacaattccacatggctggggaggcctcagaatcatggcaggaggcaaaaggtacttcttacatggtggcagcaagagaaaatgtggaagaagcaaaagtggaaaccctgataaacccatcagatctcgtcagacttattcactatcatgagaatagcacgggaaagaccagccctcatgattcaattacctcacctgggtccttcccataacacatgaaaattctgggagacacaattcaagttgagatttgggcggggacacagccaaatcatatcaccctcttagcaaggactgtgttcgtgatcatgactggcattcactgaacaatgactaggtgccaggcacctcgccagtattctttaatctttgcacagtctgtagggtggatatggatattactgttccattttttgtggaagaggaaatggaggcaagagacctgattataacttgtgcaaggtgccatgcagctaagcagccagcccaaatccagacctgctttcctatgattttcctgcccattactctcccatcgtagctcacctaatacttcctagtgggctgctgctgaacacacacccagggatgacttagtggcttgtcttgctctgaagaaggctaggcaccatgttggatgagttcttgaagatgtcttgctctagtcaagaaacttttaaatctttggagtttttgtccacatctgcctagttcttagtaaacatgatgtgggttctattagcatggcgccctccctcccttcctaccacctttatatgagcggagaacatctatgactcttatgagaaaggaaagatgaaaatcagagtgacatagtatagttaaattgcagatgcttaattataaaacagcttgtttctgaattttaattccttgcttttctctgactttttaaattcccctccttaggcagaattcatttttacattgatgattttttttttttttttttttttttgagatagagtcttgctcttgtcaccccggctggagtgcaatggtgtgatcttggctcactgcaacttccgcctcccgggttcaggcaattctcctgcctcagcctcctgagtagctgggattacaggcatctgtcaccatgcccggctaattttttgtatttttagtagagatggggtttcaccatgttggccaggcaggtctcgaactcctgacctcaggtgatccacccaccttggcctcccaaagtgctgggattctaggtgtgagccgccacacctggcctgatgaattattttcatgtgtggaacaaaactttgatgctgatcagtgattaggtacctttgtttggttcatttttaactaaggagatttctttctttttaaaaccattctttaatcttgtaaaaatatcatttaatgggtggatgttttagctgtgatgaatgacaggttgtcgtaaaggaagaaaggtatgtggtttccagtaaacttttaattcttttgcaaaataaaaataacagtcgtacagagagtaaaatatatgaagagtcaggaagtgatttatcaaaatcagatcttggactgctggttttaccatgaattaggctcttggaaagtgattgggccagtgtaggtttacattttttttttcttgttttatttgtcaaagcaaacttgtggttgcctgcccgtagtttaattctgcctcctttgggcaaacaaccgacttttactgggagtctttctcagggagataaaggtgcaccctgaaactctgctctctgattcctcagcaaagtcagtcctgagtatggggcttgggtgtctctgcaaggccttgcaagtgagatgggctgtcacctgagctcaggtggggctgctcctgccttggacagcctccccagcttctcctgcattatacccaggggctggagggcagagagcaggtcttcttctgctggtcggggcagtcacaggctttcctctcggcctgcttgtcctccgggtgggtccagcacccgctgggattcctgtgggcttagtcactgtgtggcggcggcagaaggactggggaaaccgccggccggccctggtgcgctgtcaccccgaaggaatgcgggccaggccggggctgctgggcctggaaagttctccagtccctgttgcagatctggcctgccgactcaaagtaaatctctcttcccctttatttcccatcaaataaaaaaggaacacgaggtagccactgtactcactgaagatgcattgttttttttttttttttttttttaagcgagcagcagcaagatttattgtgaagagtgaaagaacaaagcttccacagcatggaaagggacccaagcgggttgccctgaagatgcattttttaacttgctttttaactaagtatttttgctctgagctttcctggatctgtaaacacacccccagctattcaagatgggcttcttggtgaaaagtgatgtgtcctaggagaaatcacgcctgttgttgccgctggccatcacagatcccggtgcctgtctgtgaaaggctggccgggctgggtggggatgagaatggtcgggttgtctagactcagcctggactgtctttgactggaggggcctgagctcctcctccactgctcaagaccccggttaaggggacagcagagcagggatgagaagtggccctcttcacatcacctcccagcaagagggcctgacttagtgctcccaccattgccagccccagtttcagggtcccactcagttgtatttgaataggtctcatgacatgtgctttgcttgaagagcggctattagcagcagacgttcaagaggctgagctcaagcaggtgagcatgttctgagccattgtgaacccagtgaggtgcctatgctgatgcccagggccgcctgggcggggtcaggcccccatcgcttcttcatcctagctctgggagtgcattctgcactctcccgaggccagctggtggcctttggtgatcaccctctctgtaagtttttaagtggcttcctttcctctggtggagaagccagcacctttatcctatgacaagaaagctctttgtagtaggtggtagtagaatcagacagatctggcttaaaatcttggctgtgctacctcttggctctgcacattggtgaagagaatttaccttcctaaggcctctcagctacacgactgtggacactcagcttccttctaaggtcgttgtgagaggtaaagaaaaggggttagtccagggccagacatggcacaatgcctcaatgaaatattagctgatactatcataatttttaaattcccataggactcactgttaaaggattacaaggctgacacaaaaaatactgcattttgaatttgtgtctgatttatacatttccaaagagtggaattctcactacaacagctgttctttgaaaggttagatctttgttctgagataaattaagtggaaaaaggtgtagagcattatatgtactctgattcttcagggcttaatttaaaaagagcatgtttgctggtgaatgctggttcaatcattaagaagtttttgagaaggaatcccagaaagtaataagcacttatttttcatggaaaggaaccggaagtgcttggtgacctccacaggtaatcttgtattatttttgcactgtttggaattttttaaccatgtgcttttatttcttctattcttttcaaaggtcagtaggtgttatctggacaatagggttctggtctgttttctgttttcttcattgtactgtgcattaagaaaaaccctaatgtgcttttttttttttttaagtgaacctttccacatctcattgtccttcagtgagagcaggctgtgtgtgtggtcttggtgaactgtcccgttccctggagacagtatctgggggcctccctgcccttcccagtaagagctgggccttcacaggaatagaggcctaggattcgccttcatcctcttgaagagccctaacagtaggtcctggctggggtctggcatagaatgcccttggcacgatgtgtgtgagtgtgtctttccttagtaaatggccttgaaaatgccatgtgcttctggcaggcctggataaggtttgccctgcataacccttggaaagcacagttctcacttgtaacaccctgtctgcaggtccatgatattgtaattaaaaagttatgggatcacaagggcctatttaaagggcatctggtctaaaggcacagttaaaagcagaatttgtgtcagtggctcccttaatttctcaaatatggttctgtttctaaattcatcccactggatgtctgtgttgagttttctgttgatgaaagaatgtttaaaaatgaggcagatccaaattctaatgtctgagtgtaccactgcttaattactttgggcaggtcacctcacctctcttggaaagaaaggtgatatactacatctgtgattttcaatttttttttttttaactagacccacagtaaaacatagatatacaccatgatcccaggacagaataagtatataactaaaataagtgttttgaaatcacttcttgtctgacacagcactcacgctttctattcatgtagtaccacgatactttcttctattctaatgctggtaagagatgccttaaactgattttgagaactaccaatgggtagcagctagcggcttaaaaaggatgttattaaggtccttttcaccctgattttgactctgttggctctcagctgagtgccccatacttagtgcacatagagttggcctctgaggtcagcctcctgttttcctgtgaaaatgaggatggaagagagtcacttgtttccctccttcatggctaccccctgaggactgggaagaatttaagaatttgagtatatgttcccaatagcatgatgtgtttcattgttcatctgtaagcatttttaaatattcgagatctgtatcttgggtaatttttatcaactttttatttgtaaaataatttcaagtcagttattaaagtaacaaaaataatggcaaacttgataccttcccgtatttttttttcatatttttccttgaatgcttacagaaatattaaagaatattatcacatcattgtagtcaccgatgaattattttctggtggcttatgattagaagagcttgactcggagtggaaacagataacatttgagtgctctttctgttaattcatccttgtcaataaccccattagctaacttccagcaaggctgtgttaggaatgtggaatcaattagatgaattttgaaaataacttggtctgttctaaaaggccctatgagatccaaactgttgtggcctggtgcctggtaactttgatggccattttgaaatgttaccgtagtgataattcttctggaatctcaagtcattaaaagtgatatggctaactctgggccctgtgctataaaaatagatgtcatgggatgtgtgaatcctttcttcagtgttatagttaatagcaactgaaggaacgttttggtcaaatcccgaatacttattaggggctcactgcttggctgcatttttctcctctgcgtaaatcatctatccatgtaattattaacccctaagaatgaatagcatttttaaaagggttccattttcccctcatatgactttggttcattctcctccttgtttctgtctctcagtgaactttccaaaagatgggttatgatgaaaggtgaatcgtcgttgataactgctcttacttatctgtgtatcgaaactgcaggtagtgctcttcagctctgtggctggatttagtgcctcttctagggaggggtgggtgttggcacaaagcgtatcccatttccctgaatgtcgtgtggacacgtgagaggacagtgcaccctttgggcttggtgctgcccccttcacgctactgaaccccagggtcataattaaaagctgtgttagctcttctctggttagaggcatacaggttggaggcttgtacatagccgtgagccggttggtctaggccaggaagcaaaccattggaaaatgtggttagcagtgacagttgacagcatgtttgcctgcagtagtggtggttggtgctgcgtgttgactggagttgcttgcattgggagagcctgacttggccaagtgtgtagcttgagaccagttggattcctctcagagagacagtcttcacccccaagctctgggtgttgggcgtgcagcattcgtattcagcaaacatttgctgatttccgcctctgcaactactgagctcagctttggggatctgaagatgaatagacacagccacacttctggggaaatctccctgtggggaggctgacatggaaaccaaccaaatgggagtgtggtgcatatcttattagagctttgtgcaaagtgccacaggaagcaggagaaggggtagattggtgtggagggggcaggggaagacttgcctaggagcagggcctcgcaggatgcagaggagtttgccaagtaccagagattgtggggtaggtgaataaaggctgagtataaggataagtcaattcaggcagatgtcctctaagaatgaaggtgagaatgctggcggaaaccagttgtggccctgtctgccttccctaggagactggacctgactttacaggcagtgacggtgaagcagggcagtgccacgagcagatctgtgtttcctgaagggtctctggcagctgtctggggaaggagggaagctggcagagccgtgggtggaggcagatgccattgctatggagtgagcatggggaagggggtcggaggccttttggagatagatacagcaagacttggtgaaggatgaagttggggcaggtagaggaaaagcaatgagcttacggatgactggagactgactggagaagatgaccacccttgccattaactaggataggaaacaacaaagggtaggagtttgacaggggagaatgtttgtgctgttgagttgttgagtttaggtgcttgtggcacgagcaaggggagtgagctggtctaggaggtttttggaaacactgacctggctgcagagagggagatcctgggacacctgttttgggagttatcccagtggggaaggatcactgggaagggggccacccctttgggaggggtcagtgggacgactcccaagggaagaggttggttatagggagttaaaagaaaggagcacccctcacgcgagcccatttttcaaggatacatgtttgtcttttagattctataaggagtagctgctacacagaaagatgtctacgtgtgggtgaacacctggcgtatcccatgcagggaggcttcagcagaccttggtggcgatggaaccaccacagtgatccgaggattgggtctgaaggctcctccgagtctccaataaaaggggttgttttgaagggctcaggttcttcctgggcttttttgggacagtcttgctctgttgcccaggctggagtgcagtagaggcaatcatggcttattgcagcctcagcctcctgcctctgggctcaagtgatccttctgcctcagcctcctgcgtggttgggactataggtgcatacccccatgcctggctaatttttaatagagatggggtcttgggctcaagttatcctcccacctcagtctcccaaagcgctaggattacagacatgagccactgtacctggctgagaaggttttttttttttcccccttccaaacccccatgtggtccagacgaggccagaggatctcaggggaattccctctccgaggagcctccactgctattgcatggcccccagcatagtcatttgagtgaagagccctccaaaatcattaagctgatttgtagaatcagtttgctgtctgactacctgatgaagatgagaagtggtagacctccccccactgtaaggtcttaacaagatctaggtggaacatgggactgtttgcaagctacttctgtttctgaaatcacatgcttgggatcccaaataatctactgaaagctgtcttcgggaggcaaagcccagggatttgttttgtttgcccctaatcatctcttccatcccctttctcaaaagtcttatatctagataatttagtacatttgatctactaacagccagggccataacaggagctgatattacataccccggaagtcctttgcaaacacactgtagtggcgattgattagtgttccgagccataggtaacattagcctgcctcgtaggaccctcagatgctgaccgtatctgctgcaattcttagatgtaaaagagcgcgcatcgtataaatcaaaactagatgattattttcatttgaaattgttgttgcactgtaatttctcagggttttgtattttccaacagtggtgtcacttaatgggaagatcgctcaggctttgtaactgggcataataccaggtattctcgtttaggcattctgctcagtagtattaacctgaagccataggacatgccaatgtttttttccgtgttttttaaaaaaattaaaatggttggctacaaatgcatccttttttacttcagagtaagtcggccttggttaagtcttaatatttctcatgcctatttttttttcttcaaatgaaaacatacggagagaaaatagcatgtttatgccttttggttgtacccagcactgcccagaatggcttacagagtttatacccatggaggtttcgtaaaggtgacattaacttcgcagtaaagtcactgaccccgaacctgtgtcacttcaggcttagccaaatgctaacagagcagctcaaagcttaagcagaggtatgtgcttgctaagtaagtgtgtgttttggactaattggtgactaccattctgaacattaactgccctttgtgttttaatgttgccaggaggccgattgtgtaacctttggaggcttccctgagtttggagaactgaattcatgtggtgacttcctatttataatgtctttgggggagctatgaaataacttttcttctaagtgtgatttttgcttttttaaaagtttttatgttgttgtcaattgggtatttcccttctatgccaagacgaattgtaggttcaggtttctatgcagcctgtatgtaaacactggccctaaagaaggactctatcactctactttcagtttcttgcattaaaacaagtatgggtagcggtatccttcttatttctgcttcctggtcctgtgtgagaccctgaaaggtcctaatggcagtgctgattagattgtggccagggttcacccacaagttccgaagctggggaaggtggaagtgctgttaactgacttgtcccatgtctggggttttgcagcctggggagaggtgaccacccctcgtttcagtccaggtagggttttatgtccctgtcaaaaatgtgttgtgtgaagtaccttgactttcatttcccagggaagaaagcccgtttcaattggctcaagcggaaaagagcactgtgggtccacttaatggaagagtctaagagtggcttcaggaagtccactgggggctccccgtgactctgcccacctgcatattgtcttcattctaaggatccaggtggtagcaaaagggttgttacaactttaaccctgcatccccaccttcaggttcagtacccaagggtgagcaatctgttccagtggcacagacctgtttcaagaggtctctagccgtgatagtgctaggccactgccctccaccagtgtgttccagagaaagatgctctgatgtgccagcccaggccatgaggttcccggcctcagtaaggaagaaggaggacaaggtggtcccttaggagaaaatgtggatattcaagaaagagggtcgcaaaatagcaaacacccactatggctgggcagtacagggttgcagaaatatattttgatgtgtgatcgcattggagctacttcaaagagcaaacacaccactttgatttatttctcttagtgatacagtatttagagagggagatactttttatcttcgtgggatacttacagtggtgctctagaagccatgtactgcttctggcttctccttcctttcctccaaggctcctcctgcctcctcccaaagctctgtgccctgaaagagccttgagccattgctcagatgtcaaaattgtattaagcagacacatcaaattaaaacttttgggatcactcaccaatatggtttcctgtacagtactgccctgaggggggattacaagtagttatgcatccatttcattgatgtatcatttttattaaaaagaaaaacaatccaaccaagagaggaagtgtagccagctgcctaaagagtggcgatgatgggagatgatattttgattacattaatccatatcctgttagttcactttgcttctgtcgctgctgctggtgaagttactaatgtgaactaattacatttgctctgaaaagccagaatttttaatgcatctcagcaagaaaggttaatattatcaatttaacagcatgaatgaaacattgtgtgtattgaacttgaactgtcctaaaagcttggataataaaaacccagtggcttcttttataactcactggataaacagttattggtgagacatggataaggctttcttctctttcagttttatggggggtggtaggcagtcagcattagatgctgtctgtttacagggtgatatcgtaacttcgtgaaattggaggccacatttaaaaaggcactccttccttttaaaagctttgcaagggggctgcatatattttcctaattagtgggaatattttcttttttcttttttcttttttttttttgagacagagtttcactttattgtccaggctggagtggagtggcatgatctcggcttactgcaacctctgcctcccgggttcaagcaattctcatgcctcggcctcctgattagctgggattacaggcatctgccacctcacctggctgattttttgtattttagtagagacgacgtttcaccatgttgcccaggctggtcttgaactcttaagctcaggcaatccgcctatctcgggctcccaaagtgctaggattacaggcgtgagccaccgagcctggctggtgggagtattttcaaagagaacaacaattcaccacaccccaacatggtaacagtctttttgttttagaagcatctgtgaattgccaagactcgtagaactaagatgtattcaaagtcagtcgattttctggaaacgacccagtccctgaagatagtcttttggggagttgagtgttttgagagggacaccccctctacagggacttaaaatggaatggctttttgtgtgtgcacatggtacctgcagtgatttcttgtgtttaattacttcctgcactcatctgacttacacagtggtaaacaatgaggatgggaacaggcggcagctgctctgtgccatccaccgtcttgggaaccccagcgtggcattctctctggggcagcatgttgaagtgtttggctggtgacattttggtgaccagttggctcctcattgtctttcaatgtggagattaggaaccgagcgaggatttggaacccttgcgtttgttctgccaagaacatgacttgcctctggcctgagagcagtggagtaagctgataggagctagaaatactgttttgggtaggacttacccaaaagagtgggctgagtcacagaactcccaagtttgagccctgtcaaataaattctgaattgttctcaggtatgtttctcaattggaatttttttaaaaatttaatttaaaaaagacttcgaaaagttaccttgttctcatttttcttctccctctttgccccgtccccacaatatcttagggcgaagaaaagcaggtttgagaaaagctttttttcatcatgtatttgtaatagctggagcctgctgagatgatgaggtagagtggagggagaaagagaccttgaggaggtgtggagggggaaggggtggaaagttctgtcgtcttctgtgcctctctctctctcttgctcagggtctccagtcagccctctgggtttgtgcccttcgtgctgcactgacaggtcaaagccgactcaggcctttgatgtctgctctaggagcaaaagtgattcctggtcccgcagccgttcccactgccttgtgtatgaaggtctgctgctctgaggtggatggtggctctaggcaggctgtttccgctgggtgcggttgttgctgcaggtttttctatatagcttggtcatgctcctgtatctagattaaaatcctatgacagatgggcctgcttatatctaaacttattcagagagtcttatgataggcaacaggttaccctttaccggggtaaaacatggtttattctacagtttggtcccgttgtaaggccaggagatagagtctcactagtttgccccggctgaactcaaactgctggactcaagggatccttccgactcagcctcccaattagctgggactgttggtgtcaggcacacaccaccttgcctagcttgaagatctttcttctaaatgagcgggctttaaagtgatcagtgggacctgggcaggttggctcttgcctataatccaagtgctttgagagaccgagacaggaacatcacttgagcccaggagttcgaggctaaagtgagctgtgagcacaccagtgcaccccagcctgggcaacagagtgagactctgccccaaagcaagataaaattatcccacaggattttagtcctgacttgtgtattactatgcagttgtgtctgtctgaggctcagattcccccccatttaggatttgtgtggctaaatctcagatctcattttcaggtgaatttctctattaaggttataaaagaccaaaataactggaaattcaactctgtacttgaatacttggtaatgcccagcattctcttgactatcccatttcacagtttgccggtcatttccccagtgtactcactggattcttcccgcagccatgaaaggtaggtataattaactccagtttacattcaggacaatagaatgttcgtcaaaatgcttttgcacatgttttctcaccctgagtggctacacttgtacagtcataccctccaaactctaagatgtatactcttacataccaaaacacaaagaaacaacaggaagaacaaaactcaagaggtctgagtgacatcttgccttgcttcacaacttcagagtttgcattgctttaaaaacattggttataagtgagtgtggaaacagtgtgttcactatttttatgctgtggctgtgctgtgcaggagctgggcttttcgtgcattttagacagaattgaccttggttaatgcttgacttgggaactatgcagaaacatccaggaagtggtggtggctgatcctgaccgtcctcagttttgtgaagcaacagcctctgtgcctctttctctgcatgctctgttgacggtctagtcttgagagagaacctgctgctgtcccgtctgtcatagccttcctagcaactcttaggcctgcgtgctgtgttttcatgatctcccccaaagcggcactttgatgttttttcagagtcaaagtatcactgtggatatttatcccaaacaaaattgcaaactgatcaaatgttatgtcttttgataccaaatcaaaaacgattcttggtggctgatcaggttgtctcctaaaaatttgccttttgaacctatactgcctttatgagatgattatgaaagtagaaaatagcctgtgaaaaatggtacctttgctaaaaagaaaaaaaaatttttttgaaactaagagtctctgttgtccaggctggagtgcagtggcactatcttggctcactgcaacctctgcctcccaggttcaagtctcccgagtagctggaactgcaggtgcacgccaccacatgtggctaattttcatatttttagtagagatggggtttcaccatgttgcccaggctgttctcgaattcctgagctcaagcagtctgcccaccttggcttccgaaggggctgggattacaggcctgagccaccgcgcctggcctgctgtaagaaaatattaaacttaggatgggaaatgtgatctgaacaggattcctgtgaaggtacccagtgtaggtcttagtctcctctccagtgtacatttatggaggggcaagatttcaccattctgtgaagaactctgcgtgttgacgactgctcacgcctagggaataaatttcagagcatgcgtagatagtgccattttctacttaaaatactataatccattatttacttcggaaaataaaagcattaaggctgaaagttttgggttagtaatcttgatgttttaaaatgccttagcattccttcatttgttttgcttgccacgtggttttgctctgatttacacacctctgtgcatggctaatccactgtgccactcttggggctttattaactcttctctgccagtttttcccttagagaatatcatggccattctctaagatgataaatgggactaagagtaaatgcaggctgaaaaagcatttaacaggtcaaggatctgaagcttttaagaaggcaaaacaataaataagaaacccaaacagagtcttgaagcacacccatcgaaacccaagtttcagaatttgctgcagccttgctgccaaatcacagtaaaagctgaaaaggcttttgtggttagttacgtgtgatacaagaaatcgatgtgtctgagagaagtaggatttctctttttgagggggaaaaatacagcaaggggaaatgttttattaacaataaatatgcggcttaccatatctgtagggcacagatttggttagtagtattttggaggcaggataaaggaagatcctaaaatctctgtgctgtgtagcttccattcgagctgcacatgttaaaaacattctaggatccacacagtttaaacaaggtggctggcttaggaaatgcttctccccattccttggcatccccacaaccctattcccctactttctcttatgtatctggactggcttttaaaagatatttagtgaaatttaattttctagggaaactccactttgtcaaaagtgtagtattcctcaaggatagctttgctggtcggcaaatctcagttgagtgtatttgtggtttaaaaaaaattctttctgaatagaaatacaaagagtgataatgtttaacattttatttttttaaaaagctttacgctgtgtaaattgtgggttgacttcatgtttctaaactttgtcttttagaatgactctcttgggtaaattattagcagacactctcgtgttgacatgtccattttcctttccattaagctgtctccattgcagttctgttgatatggctttatatagttttcctgagcttttttttttttttttttttttttttggtaacaagatacctatgcaagctgaaaaactcttggctttttagtttgtatcacttccagaaacttttagatgctacgtatagaagtggctttcttttagggttaggtaagatacttccttttttggaaatagttttgccatttggtctcgctgcctgatttgtgctttttcttcttcagcaggtagtgggaggctgtgtattgtattgccttttaccagacacccagaggggtcatgttggaaaatagcatcctcttagcaaaaacacaatcccttctctgagaataaattgccaagtctttccaggtcattgatggactctcaggtgctgcatttctgcacgtcggggaacaagggtgaagaacagagctagtccagcactgctccgtcctcccgcatttcttcttctgtagagtcttttgcaaactagagagtcttgcagagagttgttgggttttcccaggagatactgtatgcaaagaattgtcatgaagacataaaatcaagtcttggtgtaaaacttttaataaatttaaaggcatgtctctgtttttctcctcctccatggggattttcatgtggttagtaataaaactgtaggcagttgtatgtctagatttctatgtaatttgtttgtgttcgtatatgcacacctgtatacatgtgcacatgtattcaagaaagacctgcagtatgcttgaaaggattgaggtgcctagtttgtggtagtagctgaacagagtgggaggtcaaagttaagtcattgtgaggcaagggaacttgacttagccctttaagaattggtctgtccctgctaagccaaggctattagtgttttcttccctagctgtgttctgaaatggttcacctgacattcagctgggttgggggagaacctctttaaacatcagatcttattccggaggagtgtatccagccttctcacagcatatcctgttaaatatctgttcaaggttagcctaggcctggagtatggacagcatgaagccagatctaaaacagatcagttcatggataaatgatgaatttaataaaatttgaaaataaaccccacataactagtgctgctattgatcattcatatagccagcaggagtggtgagaggcttggtctgcctgaggtgtggagatgcttgtggtggggggcaaggtggacgagggctggggctgctcctggagcatctttacgcgggtggaggagctctgacacagtggcagtgtttgtaacactttccaaagggattaaaataattctgtagagttaaccctaggctagtgtggcttgatctgaaacagtcccagccagaaggtaagaactcctgtgttatgttgttagcatacaatttgctgaagttcacattttaaattttatatttaaaaaccaaaaagtagtactgatcattttggactgtttcaaagtgatattgtttttacttgttacaaacattggcttgcctgcatctaattgcactcacaatgggccggatgtggtggcttacacctgtaatcctagcactttgggaggctgaggcgggtggatcacctgaggtcagaagtttgacaccaacatggtgaaaccccgtctctactaaaaatacaagaattagccaggcttggtggtgggtgcctgtaatcccagcttctcgggaggctgagacaggagaatcacttgaacctgggaggaggaggttgcagtgagccaagattgtgtcattgcactccagcgagtgcagtgtaaatcccttaaggaaacagtgtgttgtggtaatcatgatatcatagtaaataggttttgttcgttatttttttcttttacttccttttctaccagtgactagtcctaatgtgttctaacttttgaaaataaagtacaaattagatggatttaaacatacgggaagtaagacggaaattcattacttttaaaaaacaatttgttgtggataagatttagaaatggaaacacaataaactgtgtttccatgacacaggtatactaccaagttcttacaatgtacctttgaggtaacgaattttcatgtcatttggagtagggctgggccagtgagtcactcatctccttgttcattcattacgtgaatacctagtaaatgcccactaggcaccctggagtcatttgtgtagagtggcatctctatacaactgttcgactaactgtcggagacaccctaatcaccccagccacaaacaaatagaacattgtatgtgtgctgaatcccacaaaggccagacatgatgccatgagaccaagaaggaaaagaaataatgtggaaagggtttggggtggaaaggtggggaacctggaggcgggccacatggggccccagaagccatgttgagggttttgtcttcaccaaaggatcagtgggagattagtgtagaacattaaacagaggtggggtatgtgtcatatttccattaaaaaattcatcctggccacagtgtaaagaatagattagggaggaagccaatcaggaagcaattggagtaggcaatgcaaaaggcaaagtgaacttggactagtggtggagataagttgactgcagagagagtaggaagtaaaattggccaggcctgtgttgggggtgggcttgtgagcaggatatcaaagataatgtccaggattctggcttggatgacaactatggcaatgcccattactgagctaggagatgctggaggaagatcaggtggggactgtgagcatgagtttgatttttgcagatactgggtttgagacacttctgagtcaagcaggcatttggaaatgtggactggtgccgagaaggaattcccagcagtgacttggtttaggtggtcctggaaagtagaaacacacatgagataattctggggatggagcttaaagggacgtcagcgttcaagggccaggtagaggatcatgagctgtaaagggacccaggtggctccagcacagcgaggaaagcatgcgagtgtgatggccaggcttccagggagagaggagggttttaaggagaacaacgtgctaaaagccactaagaagccaagcagagtgagaaatgaagacctccactgggtcttgcaagaggggaggcctttgaggacctcacctgagagctgatgaatgaagtgatggctggaagcagctctggagagggaggaatactgtggggaggggaggaactgaagaagtagagaagcatggctgtgcacaggggaggtgggatggcagccagggaggagcagaggtggaatgtggatcttgttttccccaacagagatagaggggggctaaaagtccatggaagggactctgctgagagggaagggtggatccatgagacagaaggggagagctccagtaaggacccagaggtctgaggacaggccaaagcacagatggagggattagctttggatggtaagaggaaggacagatggccccttaaacatgacggtaatgcaaactgctctgttttttttttttcttttggcgtttgtgatgaactttgtatatgctttccttgtttgatccttatcaaaccttatgagaagaaactaccattctcctcatttgatggatgaggaccctaagccctggagaggccaggaaacattcccagagtccctcaggaggaggactagtgctgggctcctttcctcctgttctgctgcctctgagaggagccaggattgaatcgtagccttgtcctctgacctggaggtctgggagtaactctcttatgacttttttagcctagtagaattgaacatgaacttcatgttttaagggatggttgcatttgtttgaatggtcacttctttttctatcagtattagctaatatagggagaaggaagtcatgcttctcaagtaaagcaacagtatctgtgtatccatttacttgattgagctttctactgaattacaggagttaaattatactttgttacactcttgatattacaaaatgatggccatgcctttattataaaatgacaccagttattctttcctggaggatgtgccttgtgtcactagccgcactaagcacttccccactagtggccccatgtggttgtgtgtcatcgctgactacctgttacaggtgaggaagctgggtggtgcagagacagaaagccggtggcccagtcaggagctcctaagtggcagagccctgtctcctgggttccttctcctgtctttcttgcctctcacttgaaataagagaggacatcagaactggcctgaatggggccctggtagggcaggaacaggacacctctgtggttttgttatgatgtcctgaggataaaggagtgaaaaaaaaatctttgaggaattgaagatttctttatgaaagatggctgaaactcctgacagcttttcaaattcatctttggagaaacttccgttttctctttcctgttccgaggcttaaagctgccctgaaatctacacatttatcaacagtctcttgtcaagactccagggagacaagaactcttatacattgctgttgagagtgtaaaacggtacaacctttatggaaggcaaattggcgttataaatgcgtgttacctttgacccagaaattctacttctaggaatttatcttaccaatacacctgcccacatacaaattgcagcattgtttttgatagtaatacgttagaaataacccacgtgttcttcagtgggagactggttaatacactaagatatatgcacaaaatggaatgctctgctgctgagagaaaccacaagtatgccctgcacccctgtgaatagatctccagtatattaggtggagaaggcaaggcaggcttcttttttgtaaagttaaggagggtaaataagactgcatgtttgcatctgcttgtatttgtgcagactgacactagaagggaaaccaagtaactgaaaaacacgatgattcaccggggtaggtggggaaacatctaggtcgggacaggtatgggagtgacacacctcagtgtacatctttgtatcatttttaaaagtctgtgcttgcattatgtatcaaaacttagtgctatctcctcaggtgcagggttctctggaactctgtctaggttggtctcttggatggcattcttgcagacttgccggaaaaccaaacaaaaggtgtgagtgcatgcctcctggatagatgtctttttagtgtaacttagcacaccttgtacactgtcagggcgcctctcagatgagtcatcccggcagcccctgctccatgagtgtcttccccacagtcctgagtgcttctaaaatcatctacaccagtggaggcaaaactagatattttcttagtttgcagaaaggaatatttccagacaacatgaacttgttctcctttggtctccttttccttgtcattgttcaagtcacaaggtctgctgattaaatttccccttgggtttcaaaagaacttgcttgtttggttgttgtgttttgccttttaatttgagagttgaggcccccaggtgcatgtggtaaagaattcaaagggctaaatgggtgtgtgttgttcgttatttctttgaacctcttggcacttgaatggtgtcagtaatttcactaattatggttggcaaagaaactctgacacatggctttggagctgtgttgttcttacatcatatctcttgagttgaacctatgctctcttgatggatgaactcgtaattcaccaggtgcgtggatcgctgtgattaattgtttcaagctatcagttatttaactctctagtgccaaatgttcaggagaaaatgtaagtgcagtgtaatgtaaaatcaagccggcaactccagcaatttgctcttcaaactatagctctatcagttcccattcatttatacacttacactattcaatttgtcgttgttgttgttgttgttgtgtttttgagacagagtttcactcttgtcacccaggctggagtgcaatggcatggtctcggctcactgcaacctccacctcccgggttcaagtgattctcctgcctcagcctcctgagtacctggaattacaggcacccaccgccacacccagctaattttctgtatttttagtagagacagggtttcactatgttggcctggctggtctcgaactcctgacctggtgatccgcccgcctcggcctcccaaagtgctgggattacagccactgtgccctggcactactcaatttgtaataaatcagggtaagttatttttggtgccaagtcgattaattgaatataggttattttgcatcttagattccctctgacgactaaatcttataagcagaggtatgtgagcatgagaactgtgtcgggtggtcctgaagagattagtggattagaaggagatttggagatttttaaaaaagcctctggacagtgagttaaatggtgggttgacactctgtggtcgggactttttggagagtctataaagttctgctgtatttctcaagagctagagagagatgatactatgaccaaatttggtttgaatgtattataatgtactgagtatcactaatttgttgggaaatgactgttaaaaatacttactgacgcttaaaaatatcacctatagcattagtataagtagccaactgatttacatatatttcatgtgtgtgttgggagaggggtgtggattcgttaggccaaagatttcggtaatatatttggaagagataaatgaagataaagagataaattaccttttgaataattccaaaactaaaaatgcttcccttaatttttatttctgattttcttatttctatcagagaaatgtttctcatgtgacaaatataatgctttcatatttacttctgcatgcacaacttttaattaagtattaattgattaattttttagagacaggatcttgctgtgtcatccactttggagtgcagtggtgtagtcatagctcactgggacctcaaacacctgggttcaagggatcctcctttttcagcctcctgagtagctggaactacaggcataagccaccttgcccagcaaatttattattattattatttttgtagagatggaggtcttgctgtgttgcccaggctggtctcaaactcctggcctcaagtgatcctccttccccagcctcccaaagtgctgggattacaggcgtgagccaccacatgcagtccgtgtacactttcacaccttttaatttctttactcattaggtgcattctttagcaattatgtgtaaagtggaaatgagcgtgcaaatcgtcattttctattgacttgcactccagaattggaaaattggaaaactgtaggaaactggaaaattagaaaactgtaggatctaaaacaaatcgcttctatgacttataatattcacttgtagaactcactggcctttgtcagctttcagagtatgtgaacactttttgccatgtaagtagttagtccattggcaatggatatatgtaagttggtatcttcactgcaaacatttagttaattgcgtttattcttgagccattcttgctctacccttaggacttgattttcagtagctacagtggttattccagaagttgttagaattaagagccaggaggaggtactatgtaagctacatttagactccactggacactcacatattgcacgtggaatatcttaaaggggttgtgtgctgtggtcagggtgggaattatctcttttctttccatgagacctccactgtgcattatttaagggcctgtcaattgcccgttattcaagttttgttgttcttggaggacactattgcctatttctttccttgtttaaaaaatttcatttaggtaggcttagcatagttgcagtagaatttaataaatccttttttttttttttacagaataaatctttttattacgtaaataccctttaatttgcctatttttaaaattcttgtttctgtgcttaccttgttgttagacagccaaggggatatgctgctctttttagtgccaaggtaaaaggtaaagctgtatcttaaatatttgtatttctctttggtcttggtgacccaaagtgatttgggtcattctgacatttaatcaagtttaaacaacatggctcttagaagtatgtttaccaggtaatctgagggctggttacctggtaacgcaattgagaaatttcatcaagactaattgattaatttattaagcacttattgtccagtttgcctttaattttcatttttctaagtttccattagctatcatggcctcacttgttatttaataatgaatggttacaaattgtttgtgtgtttttgtaattagaatgtaatagcaatcgtctaccagatgagctgacattgtaatgacatgaagtcagtaacaattatgccttacaggaaaattaattctgtaatcctatcatcccatattttgcctaagagattcgatttggctgctgctaggctgcttaggcaggtgacagcatggtgggacacttctcatttttctggttagactacttaaccataacgttcatggtgccacctgaaaaaataattttatcgttttagacttttaaaatatttttaggctttttttttttttttggcttaaaaaaagaatctgttctacttgggtattttgttctccttatttcttagtgaacaaagatatttgctcgacttctatcccagaaggaccatcctttcttcttccttttccttacctctaagggatatgaagctgtgagagggaattgcatatagcaataccattttgattccagtgaaagttcttacctttctcttttgtcattctcaacctcttacctgaagagtccattccctcagtatatagagcatctggaagtctaaggtgcaggcaggactgaaagagctgagaaaggcctcacatcaggtgacactggggcacctggctgtgctcccttgttggggggtcccttggcctgggcagttttgcgcttctccctgtttccctgtgccctgagactttgtgggtcacaggcaagggggctggcctccctgatcaagggcccttggcctaggagggcccctggatttatctagtccagcttctcgtcgtccaggtgcaaaactgatgctctgagatgtttagggatttgtccaagagcagagttggagccacagtccaaatcttctgagcctagtatggtattctgtcatccttggtttcattttgttctgttcataaaaattgcccaaaactgctgggcaaagtggctcatgcctgtaatcccagctcctcaggaggctgtggagggtggattgcttgaggccaggagttcaagcctagcctgggcaacattgggagaccctgtctcttaaagaaaataattgcctaaaactattcagggttaaaaatttgtctctaagcttaagaatttggaaaaactcagaaaagtagccacctataactccagcattctgagaacagttaagtgtattttcttctagttttttgtttgtttttgagacgggatcttactgtcacccaggttggagtgcaatggcgtgatcactactcactgcagcctctacctactcaggctcaggtgatcctcttcacctcagcctcccgagtagctgggactacaggtgtacaccaccatggccagctaatttttgtgttttttttgtagagacagggtttcatcatgttgcccaggctcatctcaaactcctggcctcaagtgatccacccacctcggcctcccaaagtcctgggattacaggcgtgagccatcatgcccggccttcttctagatgtttaaaacaaacacattttagtgtagttgagcctctgatcgttacatgtttatttcctagcatttaaaagcctttcagcgacatacactccttattagcttaattttttcttttaagagctgtgttcttgctctgtcacccaggctggggtgcagtggtaccatcgtaactcactgaagccttgagctcctggcttaagtgctcttcccaccttaaccttctgattaactaggattacaggtgtgcatcaccacgcccaggtaatttctaaaaaaaaaagttttttgtagaagtgatgcctcgccatgttgcccaggtgtctgtcttgaatgcctggcttcaagcgatcctctcccctcaactctcaaaaggctgtaaccctgattttaatggtagtgtaaagtgacatgggatgaaggaaccgtaacattcttaaagtttccccattgttgggcatttgcattggtcccagttttttataagtaaagaaggctgcagcaaactctgttgtactacttaatctttgtcctttatttcaaattatctccctacaatacgtcccttgaaataggatttctgtggaaaggtatcagtttaaagctcttgacccatatggccaagttgctttccaaacagcttacctgttgagactcggacctatgcttctaaagcctatgtgtgaaatgttcacattgtctttgggagaagcttcccacgaataagaaaaataagggaagaacaaataacataattgtttggatatatgctgtggtttgtgtggacgtctcccaccctttcccttccccagcccaagtcagtcttctgtataaacaacttacataatacagactcttcactgtttgtattatacatgtattttgtgagtctgtgtcagtatttgtttacacgggaattagggcatcaggctgtcttcctagggttcctctgtgcagacttgtagacagtatgggttctttgcgtgctgagttgaggtggccccaaacctttcagacagttgctcagatacctggcagttgctcatttacccttccagaccttcctgcctctatattagccaatgacaagcagatgctttccacaaaacattcgtgtgtgaactgttgacatttatgactgttttctgagcccacaccaggtcatttttctataaaatcagaactgtgagagctcagggcatgtggccatcctggataatgggtcctgctgtctggggagtcgttttcatcaaaattcacttttaaagaatagagtgtttattaacgaaaatatgtgagccttggctgggcactgtggctcccgcctgtaatcccagcactttgggaggccgaggcgggtggatcacaaggccaggagatcgagaccatcctaacgcggtgaaaccccgtctctactaaaaatacaaaaaaaaagttagctgggcgtggtggcgggcacctgtaatcccagctactctggacgctgaggcaggagaatggcatgaacccgggaggcggagcttgcagtgagcggagattgtgccacttgcactccagcctgggcgacagagcgagactccgtctcaaagaaaaaaaaaaagaaagtatgtgagccttatcccccaaatgtacctgacatgtgaataatatggctcaaactaatgatgtgtataatattaaattgactttgttattataagtgatacataattcaattttagttaaaatgcattatttcaatcaatatcaaatattgcagaaggaaaacctaaaatagtagccaaagttactcagatgagataaagaatatgtttagggctggaaaatcatactatttttttttttttttttttttgagatggagtcttgctgtgttgcccaggctggagtgcagtgacatgatcttggctcactgcaacctccgcctccagggttcaagcgattctcctgcctcagcctcccaagtagctaggactacaggcacgtgccaccacacctaatttgtttgtgtatttagtagagacagggtttcaccatgttagccaggatggtcttgatctcctgacctcgtgatcacctgcctcggcctcccaaagtgctgggattacaggtgtgagccattacgtccagcctttttttttttttaaataaagagggtctcaggctggcgtgcagtggcacgatctcggctcactgcagccttgacctcctctgctcaagcaatcctcccgcctgagccccccaaatagctgggaccacaagtatgcaccaccatacctggcttttttttttttttttttttttttgtattttttgtagagacggggtcattctatgttgcccaggcttgtctcgaactcctggcctcaagcgatccacctgccttggcttctcaaagtgctaggattacagatgtgagccactatgcctggccaataattatataaattttgatataaattcctgctcttcaaggagatgtgggttttttttcctcctgagagtatatttataaagttaattggattttatacaaaagaagcttttgactcatttcatttagcttttaatgttatcatctgggaggagatggtgaagaattctgttagccaaaccatggcgaattaatgtttcttacagatggttttattactttttatgatattatttggatcatgaaacaagtatcttggaaaatgtgagatacaaagatgtgagttgggaggtctctcttgtatgtgagttccttctataacagagaaaggatactttcagtttaagctgagatgctttttccttttcactcttgaaaagtctttgttgcaggaattttctgtgccctccctcctctgggacagatctgcttcttgatactgcagggctccagccttccttccagccagctcatttctcagggaagccttgttttcctttttcagaaaatttaaatgtatatttaacgcacaatttaactccctttcctgttgataatttttttcttcttcatattttgttattaataatagcttacagaatgggatcagtatcaggatcgggaggtaaccaggtctccaagttttccctttcgtttttcttttctgcttttaatgagccttaattaatccagggagctaggctgcagtatctgtggctctccctgatgttttctttctgcctttctgtcttggaggggaacctgaggatttggaagtagagggctctactagtgcttcctttttgtccttttctcattgtccaaaagagtcttaagcgatctccaggaaatcccctgctcctgccaggaatctgcctgtgagtatttgagtgagttgctgctttttaagtaccagttgagaagctgaaggttggtgttgtggttgtgataaactcccaacatgaaaactgaggaccaccagcgttttcagctcacctttgactcacgctggcagctccaggaacactgaacaggagtccccactgaacctttgctgcgttccgaagcagcacagccatggttaggcactgccaggcagctcttggaaaccacagggagggaagttttggttccttctttctgtctttgtttttgagaggaatgagcttggaataaaagaacgctagtaatgactgatttgcaggttaggtgtaaacattaaatcctcataacaggctaatgagaggtgggagaaattatccccattttacagatgaaggaacagaggctcctagagactaaagaacttgctactcaatgaggtcaggattcacacctaggttgacctgaggatagctgctgcagtgctcacccttcctaccttcccaagaaacaatacgcagagaatttcttttctaaatattgtgtgcctagaaggtgctttgtgttatcgaaacagatatatatgtgtatatctggtctctttaaaattctctttaataaaaacaaaaagtgatgctagtgtaaaataaaagatatatatagaaaattgtgtgtcctcgttaatcttctttaggaaagatatatgcatatatgcagtatagttttgggtttttataaaaatgagatcatgctattagtatagtgaatagcctctatatagtctttcgtaacatttttactttttctcggtgtatggatatcaatttaggtcagttgctgcggagtttgaaacgagttaaaatttcagcagttcacaaaatggatgattcatagtttagtcgagccatcatctgttgatggacagtcatgtggtttcttgttttttctttctctgtgtttcactaatgaaacaggattacagtaaattgactcgtgtatgtgtatacatccatctttgctggtactatagaaaagtgtattgctggctgggcatggtggctcatgcctgtaatcccggcaatttgggaggctgaagtgggtggatcacctgaggtgaggagtttgagaccagcctgaccaacatggcaaaaccctgtctctactaaaaatacaaaaattagctgggcgtggtggcagtggaggctgaggcaggagaattgcttgaacccaggaggcggaggttgcagtgagcctacatcgtgccactgcactccagcctgaatgacagagcaaaactccattgcaaaaaaaaaaaaaaaaaaaaaaaaaaaaaaaaaaaggcattactgccttgttcctgatttaaataaaaaaatgtgttttaacaaggaatatgttaagttttggtaaatatagtttatcatatttaagttgtgtatactcattcatgttttaatttttatcggaagaggctgatgaattttatgaaatgcctttttggcatgatataattgtgagcttttgcttttatttggtggtgtaataaattacgttgattagatttcccaatattgaatcatctttgcattcctggaataagccctaatttgttatggtgtgataatctttggatatgttgctatttgatttgctaatatttttttaaaaattgtgactgtagcctacaaagccctacagataggggtctttagtttttttccttgtttgcattctatcaggtattgatattaggattatgttttttaaataatttaagaagaatttcaccctttcccagcatctagaagcatttacataatataggaaataacctgttttttttttttttttaagttagagtaaaattaactggaaaacttcataggcatcccctgtagtcccatcccagaacattttaaaacaaattttttagtttttcagaatatattatagttgttctgttcagcttttaagccttttctctggattttgatattttctacttgctgggaaagaatttatctacaatttgagtttatcgcacagttatttgtaatattgttatcatttctctggtaatcataaccctttctcattactaacacatatttttgctctttttttgcttttttcccccttaatcaagtttgttagaagtttatatattttattgtcttcaaaaaactaggtatattaattttatatttatcctgcttttaatttcatctcagtatttaatttttattcactttttccattcctttaagtttattaagttgaatgcctgtctcatttgctttttagtcttcttaaaataatggcatttaaggctatacattttctttgaaaattgcttttgttacgtatttttggttttagacagttgatctcctttttgttgttttctagatggtttgtaattaaaatatttatttgatctttgattctgacattacttagaagtatgtctgtccttgaatttttcttttgcttaccttttgatattgtttatatgatttatgaatgcagctctgaggtatctgagaggatttattaacgtttacttgcatccaagtacatgattaagttttaattgctttgtggacattaaaaaattatgcccttggtaaaatgcaaaggttttattttctgtatttagtaaatcaaacttactgattgcattatagtcagatcttccaaattcatgtatgttttcagttgtcaaattgacagttaatgatgcaccttttataatttttttttttgagacagagtttcactctgtcgcccaggctgtgtagtgcagtggcgtgatcttggctcactgcagcctctgtctcctggattcaagtggttctcctgcctcagcctcctgagtagctgggattataggcacatgccactgcacctggctaattttcatatttttagtagagatgaggtctcactatattggccaggctggtctcaaactcctgacctcaaatgatctgcctgccttggcctcccaaagtgctgggattacaggtgtgagccaccacaccgggccccttttataatttttaaacttttcatatttccaagagaaatgcttagtgtatttatctgccgttttgcttgatgcatcaatatgtgtaatttttttatttttcagggattacatatttatcacatgtaatatccctctctgtccagtttaatgcttaatggccttgagttcttggtttgattttactattgccagctttgctttctttttacttgactttgcttggtatactcttgttcaattgtttgtttttaaatagagctggacttttaaaacccattgagacatttttgttctctaatagggacgttctgccttgtctttctttactgtgataatgcatacattttgctttattgctttcatcttattcaatggttgccatttattttactttctgttattctcaattcccatgttaattgaacaagtcctttgctaatttgaaaagtgtgttattttcaaagctaccggtgcctaacaatttgaaaatctgtatttttctcctgaaataggtaccagcattaaattactaattcttccaccagggtttgcatttccgcaatttctgccgttcccatgactttctctgtctcctggatgtgttctctgtcttttcactcatggattctagtagattcttattccttgctcttgggcgctcgcatttcttcttcttaatcctccagaatctgatactctagagcaacagatcttttctgttcaatttaaaattttaaagtgtttttttttttttaattcctgaaagtttttatactccaattgtgtctccacatatgctcttagactcctcttcccgtctagttctcctttcttggttcgattagttctgtttcagctggtgccacctgttgcagctgagcttggtcaccctccctcaggctcctgcgtcgtcctcagtgggtcatggtttttctttgcttgccgatggctgccctcagccgtcacacaagtcatgggttagtgtcactcaaggaatggcagaccagcagatggtaggtgataagccaggaaacagatactgtgccgctgagttgctctgttcccagtctcttccgacaacataaggcttgggaacagttccaccttccatggaagccccccttccctctggtttcacctgggacagcaggatgagcagggtgcagggccttcttccctgtggatggactctcagttacaatgaccatggagaactgtacccgctctctgttttggagatttgggagatcctgagggcctcagaaggccctcactctcatcccatgcactacctgtaagctcattagattactgtccttgttactttagagaggggactgtgagggaggcaggaccaagtatgtttattcaggccactgtcttccccataaagactatatttgtgtacatttttctttgctgtattgtgagaaggaggtagaaaaaagatgtgcatgtctgcatttggaaacagttctgagagtggtgctgcatcagcggggctggattgccctcaactataagaaagtgggatacttatataaaggaagcataatacagcatgtttctcttacaggaaggactgtttcttagagtcctcatcctctgtctccatcactcagtatagcaaatcatacattccatcaatgttaatgacatcaattgtatgcctgtaagtatgtacacacgcacaggggcagggggcacttcttcactccacagctggaaaacttgggacaaaatgcctagccagcttggcccaaatttgagggtattgccatctgtatctcagtgcaggtgtttctgtctgatgttcacagtctgtttatccagagtgccccagaaaggacagtagtgttaggttaaacctgtgtatgtctgttcttggttttaataacagtcctgtctttggaattatttagtgtgttctctcatttctcaggaagtcaggatgttagtgccgaagcacttctctgacttggtccgacattgaagtaccttcccctgcattacagaagaacggccccccagggggtctgtttgatgaacacatgtattattgcagtgagatactctagaaatagcttcatgtccttgcaaaattgccagcacaagtaaggacctggaaattgttgctatgcatgtatgtcagaagatttcttaaccaattctgtactgaataaaataaaatttattttcaagttttgtagggacctggggcaatatgtcagatagagttgaatattttcaaggcatttttagttcatggggcacatagttggcttaagatatctatgtgtatcaggactgaaaggtaaagtgcccgaacctgctaatgaaagaggtgtctgtgtggccatctgaggttcagccacaatgtgtcttgcagaattattttattttgctagtttttaatttctcaaacagttcagctgcctgtcccgtggtaccgtgagacttctaattcaagatgaccagtatttgcagacagagccactgcctttgctgccacattttgcttggttattgtgtgagaacaccatttttctctttttaaatgaattgtgtttctctttttaaattgagcatctgactgggcgcggtggctcacgcctgtaatcccagcactttgggaggccacggtgagtggatcacctgaggtcaggaatttgagaccatcctggccaacatggtgaaactcctgtctctacttaaaaaaaaaaaaaatgcaaaaactagctgggcatggtggtgcacatctgtaatcccagccacttgggaggctgagggcaggagaatggcttgaacctgggatgcggaggtcatagtgagccaagactgtgtcattgcactccagcctgagcaacagagagagactgcctcaaaaaaaaaaaaatccgtttacatagtgataaataaagtaattactatagtggtggcattctgcctaagtcatcttgaaaactgaatgcaaaatctttttaatagctccataatggtctcttgaagtgttacagatttttataacgatagctgtaatacaagtgcctttatttactgtgagacttgaacattttgaccatttacatgggtacttgtgtgtctccagctgagctgagtgcatgtcgctgcggcattgcaggcgtgtgtgcatgttggctcttgcaacggggcgtctgccaggggttgtctcgggcaggagaaggaggccagactggcaccacttgtagtgattggaatgtgtctagtccagctcttcagttccatgtaggaggttttaggatggagattgtgttttgggaactccaagtcactgtccaatttggagagtattatgtaagaaggcttatgttttctgattacccatccttcgatacagaccaaataataccacagtgataaaaatgggaaaggagctgtcgctcagctcttcttggccgtgttgtttgcttttcgatgtctaatttatgaaagcatttcaaagtgacatatatactgaacagcttcgtcttgccaaatgtaaaataaactggagatgagtttagcacagagctttgtagattgttgtcctcttggtagagtcggggcctaaacaccacctggcctctgtgccagtggacaggtgacctgcctgtcctactgctggtctctgcagctctctgtcttgggcaaccctggctctgagttccagagtgttctccagtaggagagtctgcaggggcactgtggagcacctgggtatgtgcacatctgttgttggctggcgttgtctctgatggcttggggtgtcacagagacatgacagtactgtcactgcatacctctcaagcttttgctgagtcctacatgagttgcaggggcagagagggagggagaaaacaatgcctagccacactgagaaaggggaaagtgctacagagtcctggaaggaagcgaggatggacatggacggggaagcattcataccaggcaggaaaagtgacttcatggaccagtcacagaggacagggccagggatcaaaccttccgtaatttgcctccacagtttgtctgagactggctacctggttgagtctgccagagccctgtgtgcaggtactaccactcactgtcacctccaggcaggaaaggccatgtgaatgcatgcatctttgcaggaacttgcccctttccactgaggtttgaggcagactccaaccacatttccatccagtggcttagtggtcttacccgtgagcttgaactgttgtccctgccaggacagtctttgcctctgtaagtatctccatattcctccatcctttcaggtcccattcagtccctaggtcctccatgatggaatattggttgatgcacttattccacaaacatttgttggccacctttcaagtgccagacaacccttctaggtatggaggggtacagtgatgagcaagccactgtttctggctgcagagggctcactgtttagtgggagaaacagacaaatcatacatcttaactacactgcccttgattgctctttacctgttatatcagtcgatcttgcctgcctagcatttgttccctgtttgggggcctgtatgatgttcgtttggatacctcagggtacattttcccatctttgtgatgatgtagctcacttggtctgaatgatatgtaatcctgcacatgtagagtgaccattatatttgcataaatagcattggaggaatatataagaaatgaataaaagttgttatatcatttgatttttcttttcttttcttttctttttttttttttttttgagatggagtctggctctgctgcccaggctggagtgcactggcacgcgcatagcccatcgcagcctcaaactcctgggctcaagtgatcgcctgcctcagacttcattttgatttgtgaacctcgtgattctattacttgttccacaaaaaattttaaatgaaaaaatatttcaaaaatacatatattccggccaggcatagtagctcatgcctctaatcccatcactttgggaggccaaggcagacagatcacctgaggtcaggagtttcagaccagcctggccaacatggtgaaaccccgtctctactgaaaatacaaaagttagctgggcgtggtggcacgtgcctgtaatcccagttactcgggaggctgaggcaggagaattgcttgaacccgggaggtggaggttgcagtgaaccgagattgcatcattatgctccagcctgggcagtgagtgaaactctgtctccaaacaaaacaaaactaaaacaaaaacaaaaacaaaacaggctgggcacggtggctcatgtctgtaatcccagcactttaggaggccgaggcgggccgatcacaaggtcaagagatcaagaccatcctggccaacatggtgaaaccccatctctactaaaaatacaaaaattagctgggtgtggtggcaggtgcctgtagtcccagctactcaggaggctgacgcaggagaattgcttgaacctgggaggcggaagttgcagtgagctgaggtcgcaccactgcactccagcctggcgacagagctaggttccatctcaaaaaaaaaaaaaaaaaaattcctccacaacatatattccaatgtttagtttttctgttacagagatcacatgtactctaacttgtcaactaaatttaaaaggaaaagacaactttgagagaaaattaaaaccaatgcagtgtgtgtaaatgccattttgataagctcttatttcatgttgacatattctatggtgctcgtcttacataacctagttagggaaatgttttgttccagtctggctttgtttttcttcatgtgtttaggtccttccactttccttttgttaatttttggtgttgtacttcaggaaatgaattgagggttgcaaatgacctggagggccttagtttgtttgcttgtttgattttagcaacagtcaccgtggtacacctgacgtggctgggactcctgattttttttttttttctttttgagaacaaagaatgtgtccttgtcttggcatggactgggtagccttgttcacctccccacccatctctccttattggtgaggcattgtaaaccgtgttaacaggtagcatccacagaaccctggaaaggttgtgaagtccctttggaagcctaagggttttgatctcatccaggttgtaatcttaaattctggtacaaattcccttgttacaactgggttaagtggttttaacctcttttgtgccttcattttgaatgcttagactggaaagtcgttcagagactcctgaccgaataaagcctacttccaaatgagtgggttgtccaggtgtgcttgtagatgtcacatacttctaacaaggctctgcagctgcgatgtcaccttgcccagcgtgacctcattagcatgtatgtggctttcagtggccatgtactttgcttctagagctttctttcccattctgggttcttaggagggggctgtgctttgtgtgtggccaggcagaagtccatgttttagcttttcaattctcttgaagaaaacaaatgttgttgataagaacacttgtcatggcatccgatttgttcttgtgagggctgtattagcaataaatagacatttagtttgcatatttaacacctcatcttctttcagcccacacgtcttcactacaggattagcttttcattacttagtagagcttttaattacctgaagctttcgtgtctttactgggatataacttttctccttattaaccagaaaaagtcacagaaaatcttgtaatttataatggaatggagtaatattcacaaacaggctttggcaggattttttttgttattgtgttttttgtttttgtttttttgttacactagttttatcacaagacaagaaagaggggaacttttagaaataaaaattatgtgctaaaataattaaccttcctgagtaacacacacagaatgttggtatagtgtttgcaccagaggaattacatatggaagaatgctgggatcttttaccaaataagggaaagtagagttcattacaaatagaggcttctagcacagaaaagaggacattttataagtactgtgaagcattttcagagataattaaataatagaaaatattaaaccaatttaaacaatttgtagtttttttctaataaccagtaagttcttcgtcttcgaataattcttttatactgttctatttccagctccactgagtgcccctgtgttttcagagaaaacaggagtctgttttggacttcctctttggtatatatggtgggagatttgtttaaaaaatttttttatagaggtaaaattcatatgacataaaattgtccatttaaaggtgaacaactcagtgacatctagtatattcatactgttgtgcaattgccatctctatctagttccaaaatacatttgtcatgccgcaaggaaagcctgtaccccttaagcagttaatccccattcccctttccgctcagctcctggcaaccaccagtctgcattctgtttctatggattcacctattttgcatagtgcatataaatgcagttatataatatgtgaccttttgtgtctggcttctttcacttagcataatatttttaaggttcatccatgttgtaatgtatcagtacttcatccctttttatgggtgaataatagtccattgtatccagttgtatccagaagatttgcttttcattgcctaacttcagggcttcagacacctcaatctttgttctgagatggatgtaaacttaatgtatatctctctctctcacccaatgatcatgccaacaccttttttttttttttttttttttttttttgagacagtctcgctgtgttgcccaggctggggtgcagtcttggttcactgcaacctctgcctcccaggttcaagtgattcttgtgcctcagcctcccaagtagctggggccacaggtgtgagccaccacacctggctaatttttttttcttttctcttttttgtttttgtagagatggagtgttgccatgttggccaggctcgtctcgaactcctggcatcaagtgatctgcccgcttcagcctcccaaagtgctgggattacagacataagccaccttgcctggccatgccaacaataattatttagaagtatgttgagaatacatcccaataatagaagtgaaagctctttaaaaagaaaaatattcaaaacttaccagctgatcttatgtttcatttagaatggctgcattctttgcagtaccctagggttgtagaaattctcccccatgattgcacaacccactccttctcagccagtgtgcacctggagtcagctgtgtttggccttaaggtgtccatggtccagcagggagagggcagatgggtcagtgttgtcctgctagtgatgagtatcccatggtgggcatgctgatgccacgcaagggagagggtgtctggttctgtgcagtggcagtggtgcaaccccttaccaaggtaccgtggggacctgggttagggcaggaggaggaaggtgttctctacagactgcagggcttggaggcagcctgtcatggggaagggtgtggatgaagggtgagccgggaccccaggcaggtacggagcagttcaaggccgtcaagtgtgcttcattcttcagtcattagggtgtctctgaaaggtttttcattgaatcagaattcccctaattcacgaattctaaagcttaagtaaattcagtaataataaactgtcaattatccaagcgatgaatataaatccataaggtttttcaaatccccagaaatccctttcgtctcccacctggttttgctgagcgcctgtctcttctgtctcttttctgattcccacctttcacttttcctccatttttcgcttaatggatttatactttaaagtaggtattctgaaaattccaattttatgaatggtgtgacggtgagaactttgattcattgaaagataaaaataatcattacattttatactgcaagggtcatccttaatattcttcgtatttttaatatagctgcatgatttgagtagttgagttggggattggataatgtatttattgattgattaactctctgggggtccatacatacccctctttatatccctgtggtccctttttagtccttttgtaaaaacttgataatgttaacctctgccaaagttgatgcggtagttgtgagtggtgggacgcaagcgtgttgatttattcttggagacagcagaaacagcaccaccttcaactgttttgtcatgatcatcttgtaaccataattctgtgctaagtcagaattaatgttattttgttaattcaggttattgtgaaaatctccacaggaggttatttaagcaagtcacaaattgatgtttctgtttgtagaaaaactccagctcatccagccagccacattattccagggctgcatggtgtcagcgtagggaccaggctcggtgtagagaccaagggtgcctttccccttcctttccgcccgttaattgcctactcgcccagtggtaccttctgaacttttagaaatccagataggatttccacatggttcattagaattcatttatttttttccatctgtatttctttttgttgtactccctagatcattatttttagttactttttacatgcattggttaggtttttcatgtaatctctcagtaagcgtactgggggatgagtgacctcagtatttaaatttttcataggtgggatgaaatgtcttttctgagtgtgagtatttctgttccattcttcttttccaggcaggctctcattctgtgctgcagtttggattcagggagcactgacccttctgtcaggttgctcctgctatgaaggatggaagggcattttgatacatgaggcataactgtaattatccggtggggcttggtttgtgctgttttccacctcttcgtcatattttggaaaactgaggccaaaagcaaagttcattttcccctttaaaagcttctttaaaaaaatgatgaaagagctttatcaatgttttgaataacccagaaaatatttcttattgttgataatctgcagtttgcaagtgcagcgaatcttgtaggtagatttaccttgagttttttgaaacggtagaattaatgtattaaaacatatggtttttagttaaaataggatgttaaaggaatagagcgcacgaacaaaaaactttccacttgaacccatgttgtttcatctgacagtgggtatggtgtccctggcaggatagggcttccacctcctgctggtgccggtaggacagggaagaggtggggaacactgtgtctccatctcccaagcatcttacctcccaagtcagatccctggcattgtttgaatacttgcgtgtttgtgtgtggggtgatgttttcctgagaatgtggcaaaataatagaaggtcccagggttcctcagtctgcagaccatagctgagtggtgtgtgcctctagccatgaggtgaagcataggtgaaattcagatccataggaagacagacagactttgcaagttagtaagctaacttgctagaggaaacggtagactcctgtgctggctgccaactaaaaagcctttctccacagttctgttctcatgtacaccctcaggaccttggatgagcttgtgtgttcaggaaattgggcaccgagattttttttgtatctttgattttagttgatatgtagtccttccaaggaaagtattcgttggatgccctttctacactttggcattgtgcaagaggtatcaaattttaaagtaaaagtgcacaacctggccaggcgcggtggcttacgcctataatcccagtactttgggaggctgaggcgggtggatcatgctgtcaggagatcgagaccatcctggccaacgtggtgaaaccccatctttactaaaaatacaaaaactagctgggcgtggtggtgcgtgcctataatttcagctacttgggaggctgaggcaggagaatcactttaaccagagagttggaggttgcagggagccgagatcgcaccactgcactccagcctgggtgacaaagcgagactccatctcaaaaaaaaaaaaaaaatgcccacaactgggcatggtggctcatgcctgtaatcccagcactttgggaggctgaggcgggcagatcacgaggtcaggagttcgagaccatcctggctaacacggtgaaaccccgtctctactaaaaatacaaaaaaaaaaaaaaaaaagccgggcgcggtgccgggcgcctgtagtcccagctactcgggaggctgaggcaggagaatggcgtgagcccaggaggcggaggttgcagtgagcggagatcacaccactgcactccaacctgggtgacagagtgagattccgtctcaaaaacaacaacaacaacaacaacaacaacaacacctcacaaccctggtctcccagagcttccatattaataaatctagacaatgtgaaatgcaaatccacttaatatttgatgcaaaaaaattttatttgacctgttattttaactctttgacataaaatctctaaatcaaaataatcagcaacagttttaagtgtataaatatgtatttctttcagtgcttgaacatttttagacaggaagattcttgatcttctttgtaagcaaatagcatcaaagagtaacatttctgtacctttgtggtatgtaccttgtggctaatttgtccatgaagggataggcattgtgttttgttgcttaagtcgcttaaggcctttaaagcatttccaaactcacctatttttgctctaaggggtataaggtgttaaaaaatgaatggaagttaactcattctcaccttgtctgctaacttccttttgttctttttctgtaagaactcataaagctgtatgcatcagctgctcccaggggccttctaaggcctcagtccaacaacagtgctacaggtgaggaaaggaaagaagacactatgtcatcatgtcattcttttagacttggtaagaagtatattcaagcagatcagatgctctcagaatcacagcgtgttgtactgctagtaattaaaactgaagtccacattgaataagaaataattttttattgattgctggcatttgtgagaaagggtttaattagaccaggatatggaggggacttatcgacagttccgttgtacattgttgacatggttattttctgtatctcattttgcctgggaatttgtcattctcttctattttcttatcagtagcactgcttttacacttattagccctagctgtttgtcttgcttatttaaacttgtacatggcacatgctcaaagatttttccaggcaaaatttctttaaagcaggatttgagattttctatccccttccgtctgctggattattccggtgagtgttaatctcccgcctttgtcttagcctctctgtggtcttcggttgcttccttgttctctgtagatctcctgagttggccattagctgtcaacagtcagcacttgctgcctctcaagtctcttcccctcctggctctgccctggttttgctctctgacggggatctaaattgggattctttccagtgtggaatcctgggtgtccaccatgtcactctgacttccagatgataatgagtgtgaccatgggctgaatgaatgtctctctgctgggattaaaagttagaggaaggcaaaaacagatattgcgtgttctcacgtatacgtgggagcaaaaaaagttgatctcttggaggtagagagtagagtgatggttaccagagactgggaaagggggcgatgaagaggggtagagaatgagtacaaacattcagttagatagagggaatacattctaatagggtgactatcgttaacagtaatttactgtatatttccaaatagctagaaggttagaaatgttcccaacacatagaaaggatacatgtttgaaatgatggatatcctaattattctgatcattatacattgcatacatgtttcaaaatatcatattaaccccataaatatgtacaaatatcacacatcaataaaaaataaaggggaagacataggtgtaggcatagatttttaagctgagaaccttttgacagggaagaccagggatggttttagggtgtggggaatctgtgtaagttggccgttagctgtcaacaggcaacaatcactgtctctcaggtccctcccgctccctgccgtgtcctggttctacttgccggcagggatctaagttggaattcctttccaacatggaatcctgagtgtccaccatgtcaaaattgtgtcaaaattcgtctgtatgcatttttcttggtagaagggtccccaaaagtcaccacattctcagagacttctgatccctaaaactttagatcaacagtcaataaaaaggtcccagttgtgtcttagtccccatggcagtacttttgaacatttaaaggtggagaattgctactgaggactttgttctgtggatgaaacttcgaatgaggattgttggtgagagttggattgttgttgtatgaggaagtgcaccttggaatctaatggggtcttcacggagggggagtcagttgtggcactgtttgtgtattccattcatcattcatccctccatccaagcacccacgtggagctcagaaagatgactaacacataccccctgctgctcctgtttttctaaggtgtgctgggaccatttacatttagttctttggagaacacaactacttaggatttttgttgttgttgttgttttcctgtacattgtcttcctctctcccttctggtacccattccaccctctctccccttcctcactgccgtttcataggggttctcagattcctgtgaataaagcaaaccgatgtgcagatatgtgtgcttacacatgtggacgtatttgaggaggtaagagggacctgcacaaggctttagtgagtaagcagagaagttatttatatatagtgagacccagtaaacggtgatgtcgcaggtgaggcagttgatctggtcagaatatgcctccagagacatcactggtgaggcctgcatgcatgttgaaaagagtgtatcttacatctaggcttgggtttccccctgcagctcacttatgaataacaacgtatgcaagagatttgaacattttcatgttcaaatgaaacatgaaaagggaaaaaatttaaggttacggttaagtttggattgtttgcttattggtttggttattggcaattgctacaaagtccagggtgttctttatcagcagcatgcttatcaagttactgacattcaagctgagtttccttccctccctccttccttcttctccactgacattttttttttttaaataggtagggaggcatttaatcttgtagcagcatgagagtagcttaaatgtccctcctctagcagtatgtttatagcagcgtaggtaaggaaagcccagcttgcacagctgagctctaaagtgcatacatcccttaagttctcatacacacactggccagtgagacccccaaactgcgaacagagaattctaattgaagtaaaagcatgaagtttttctttattgaccatgtagcaactgtggaatcatttgaaaatttctgaaaacatgaaacaggtgtttataaggagttttctgacttaacaaaattggtgaaataccaactttactaaaaactactaattcataattttttgattaataatttctagtctggaaaagaggaattttttgaaaatcactgatatttttgatatactgttgttttcaaattgagttctcatagtgtggtcggctctgttctatggaattaatattgaacaagctgttctgaacctaagaaaggtttgtaaaaaataaacatgaaggaagacttcattcaagaggtcacttaaaaattattattattattattattattattattattattattttaagaattaggtctctgttggccaggctggagcacagtggcacaatcatagctcactgaagcctcgaactcctgggctcaaacagtcctcctccctcagcctctctagcagctagaactgtatatgtacaccaccacgcccagctaatttttttttttaacttttttttacttttgaagaggtgagattataggcactagccactgtgcccagccaaaaggtcactttttttttttccttgttggggaggaatcaataacaggaacaccagtcatgatttggtgttttttccagggcagacaaataaagatgatattacgatgtttgttatcacagaatatgtttgcttttgataggggttgggtgctgaagggtaagtggttagaatcattctttttctaagggtacagccattaatactccttgattcaaatcactatttaagttataaatacatggatttattttctaacctcaaaattatagcatcttaccacatatttgcatgcctctcttgagttaactactggtgatgattcttagctcatctgtggccaagtatagataagagaattagaaagttgtttccagcgtgtgaacttttatgattttcttccttggttactgtactcagttcttttttgttttgtttctatacaagatgagtagctggtggctcagatgacccccgtgctgcatgtacagtcccatccagagagtgttgggggctgtgtaaacctcgaggctcagagtggctgccattttcctaaaagagaagtatggctgctgttggcctcaatgttcagctttacaaaaactcccgtaattaatgaaggtcaaggcatctgcaaacattaatggggtcacaagggacaaatcagttccttgaggggaagttaaaatgctagattgcttaccgctccagacaaggcgttctcaagaagtatgtgcagtttcagcacaaggattaacacggagcattacttgagccatggggtgccttgggggacatggatcagcaaccatttccttttgctcacagcgcccagattttgttctggggaccactcttatctgcactgcatagcagccacacattttgagtgaaattaaccccaactagcattcgagcgtcctcccctcccccaaaagatggactgtaccccacactgtaatcagcagggaggcatttcctggccacagttcaggttggtcccttagaacgctgctcagaactgtggtttggtggctctgggaagcagtgctctctctgagtgtgaataaggatccacatagctccagtaggtgtctgacgacatcttgtgatccggggggaagccagcctaaggacaaagccattgtggggtgagagacaggattggcacaatcactgacaaccgcagtagtagcccagaataaactgtgcctgaaacctaccctatttttgtattttttccagttttaaggaaataaatcccctttattgtatactcagtttgaatcaattatttttatctctttgggattggtttttggttaatctcagcaattcagaaatagctgaagaactatgctgtgggtttagacatcatgccgtgacaaaaagaagaggatcttagaagcgggggacattcactgaagctttatgagcctttcctgaatcccttcaaatcagatcaagttctctctctcctgtgcttagaaatgctgcctgttaagtcacgttggctacagcacccatctcagatcccttgtgattcagttgtaaagtagattcttctggtctgaattagaggccaaaacacaagacagatcaaaaatggggaacatattgcaaatttccccacaaaagactgaaggatgtgtttaccattgattgcacagggactgcagtgtctatgcttttaggcatggaaaatgcagggtttgactatcgagtttagattttaaagttgaggattgtttctttaagaagaaatatagaatattattcagtcctaaaaaggaaggacattctgacacatgcaacagcgtgaatgaaccttgaggacattatgccaggtgaaatcagccagtcacaaaaggacaaatactctatgtgatttcatttagatgaggttccctggagtagtcgcattcagagacagaaaacagaatgatggctgcggtggtgggggggtggggggtggtttggggaagggagtggagtgatggtttcacttttgcaagatggaaaaagttctggaggtggctggcggtgatgttgtacaacagtgtgaacttacttaacattgctgcactctacttaaaaatggttaaaacggtacattttgttatggatattttcccacaattaaatttaaaaggaagatgagtagtactcgactcattattggatattacatcagggaactggaggtagggtctcacttactagttacgtagctcaggaacctggaaccagactccttctccagctgggcagtcccaggtttgagtcctggctccactggaggttgtctgacttggaggttaataataacctgccttagtcccagagtccttagagggaaaataggttataatacctgagtccatgtgtatcaagccattgctggttccaggcccctggagcactcagaaatggatgacccccagctgggtcaggccaagtcctccctgctgtagcaagcgggaccattgcctcgttccccccacctccacatggaaggtgccttttgtgtcctgccccatctctgttttaacagtcacaagactgtaggcagatctaaacttgtttgcacattattatcacctggggagctttgacgattccaaagccaggctgccacccccacctctagaccaactgaatcaccatttccaggggtgggactgggcatccgtgttttcgaggcttctgggtgagtaccttgtgcaaacaagttcagggaccgttgccctagacactgttcttcccctcatgtctcaacctgggcctcctaccactgccaccaccacagctatgccacctgggatgtgtcccaagcccccacttgtcggggaagcagctggggaggggtctttggccacctctgcagctataaggatcagagcaacacctggcttctgtgcctgtggcccctgctggtgctgggtccctggtccgcactgaaggatccaggcagagtacagtgggtctcccaggtcagaatcccctgggttgcttgttaaagctcacagggctgggccccaccccagggtttccgattcagcaggtctcgggctggttggatgatgagaatttgcatttctgtcaagttcccatgtgatcctttttggggtctgggaccacactttgagaaccactggtctattaaacaaatctttgcaaattagggaggtgtgttgtgggaggaagagactgatagttgaaagaatatttgcctaaatacagtgcctagtatttgccaagtacgcagccttctttctggctttaatcatacagactttctcaatcacatgtaattgcacatcctttaagcagcttttgactgactttggttttctcttttgtggtgattttccttaaactcccgaagggagggtggaaggggcaagagaaatttttatttatttattttaatttaattattttttattatttatttttttattttttttttgagatggagtcttactctgtcgcccaggctggagtgcagtggtgtgatctcaggtcactgcaacctccgcctcccgggttccagcaattctcctgcctcggccttctgagtaacagggtctatgggcatgtgccaccatgccgggctaattttttgtattggtagtggagatggggttttgccatgttggccagactggtcttgaactcctgacctcagatgatccacgcgccttggcctcccaaagtgctgggattacaggtgtgagccactgcgcccagccagattttatttctttaaaaaagaaacttactagttatcaggacacttgtgttcttggtacttgattttgtcagcattatttttaagagcctcttccctccttccccctacctccctgttgagcccaggctctgaaataacataggtgcatgtgaagttcccctacctgccattaccagacattggtgctgggcggccctcacctccacctcctctcacctgaggccacagcggtgtgcaaggatgtggtctgtcttgagtgtgttttcaaagcagctgtttggtctgtgccttggatgtttttccacagataagcccaaaagagaaccacatcttaaaacgcccgtgaccttgaatggtctttccggaggggcggctggatttgtgctctcatcgtctcaggtatgtgtcaagccactgttgtttcagagctggacacaggtgcttaggaaaattcctcactgaagggttttcaggatttacaagttcttgctgtttttgtgaccttgtgtggtttctggtttcacagaaggctttgtttcttggttcttgttgctgctttcagccttggcctgtaatcactgggcgccagggagggctgcggtctgtttcccggggtgtgctcagataccgtgtcagttcacatgtgttgctgcagcggcagggggccaggcaggaggggcgggtgtcctgaagcacgctcaatttgctgatcagggccttcacttggattttgcacttgccgcagtggagacattcctcgtagctactcagtgtggtttgttttaagtgggccatccgttaattcatgtgacctggaacttggttaatgtacttgccaaggttaaagttgagacgctgtttgttaaacctttcaaagagggaagaaggttgccttgaattcagttccagggtttgggagtctgagagggaggtggtgaggggcccggggaggccctgagaaacaaaatgctggttaaggacacagtctgctcaccgacctcggaagtctctagacgtctaaagaagtccaagcaaggaatgatgaccgaagaggaacctcaagggtgcaggcggctctgggatctcagcacatctcagtgatggaatgagctgccggggaatgacccctgtgggggctgtccaaagtcagagcagacacaaacgtagctctccaggccccataccttggtgggcaagagggcagcaagtgcatcctcacagttgatggggagagcagcatttcagcctgcagaaaagagaaccacacagatgtaagatgaggtctgcactcacttgcctggtcatgcagagacggagctgggagcagctgcatgacttttcagagaagtggcacacgtttactgtaagggtcccaaatgtagaccactgcagatcgtaaggtctagatggagggaccaatagtagggaagtaggggagaagaaagtaaaaccttacagtataaagacccatagatgctcttttgtttttgatgtgtgtacgggggttagatatttattgagcacctactgcatgacagagtgttcagcaatgacaatgcagagcttaataagaacaggttctagactaatcttttagggggtgaggatagaacagaaataggtaattatgtcctgagaacatgagagagtgttggtggacagaacggcgatgtatccccaagggcaactgaagccttcacagaagatgcaaagcctgtacgtggtcctcggagtcatgccacatggtgactggttatcttagtcgtaggaaaactgagaagctttgaggcatgttctatctgtctttgtgggcatcatcttcattatttgaacaattcagagtgcttgatgccttttgcttcgttctcacaatccttgacactaagctgtgggcttgggttatagtcactcattctgttattcatgtcattttgcctatccttccacttcacagatgagaagactgagacccagagagggtcatggttttcattagccaaatggtgcagaaacccagtggtcacagtggctctctagctctttgtcacccacagggcccttgataagagtacggtctttctccaggggagcagggttgaggagtgggggcagccctggcctgggtggccatatcctgatttcccctcccttggcccatagctctctatcttgggtgaggtgagaaagtaaggctgctccttgactgtggtcccttttgtgtctgtcctgcactgggccaccttcccaggggccttgtgtcagcctggtagtggtgctagtggccttgaagtgagagtgggtggatcacacatggcagatctctggcagtgaccttttctgtggatttccggtgactgatgatagcctctttggaagtcagcatatgcatagctctctgtcttttgaaaacaatggaaaaacccaccaccagccccaaaaccagctgtctttcttcttatgaatagatatccatgaaaagcagaagagtagtttcttgtaagtactctgggagtgcataatacattttaaataagattaaaaattatgttttattcttactagcatcactgtcagataattgagcgtgagagcattcagtgctgtgtgcttggtacgaagtagtaacatcaattcagtgttcagtacatccactttgttccagaacaatgtattcaaggtcggtgtattttggctgtgccacagagttctggaaattcccaagagaataagttttcacctgttatataatccagcacaagtgactgtgtagcagcaacctcatgtttcatgatgactttaaaatgcaattgattctaaaatttagcttttaaaaatttcgacttcagattttctctgaaggtttaaggtaggcttctcctttattaattttttcaagaaatatttaagaacactgctctgtgctatgtaccattctaagcactttacagatactaattcatttaatcctcagcctggttaggtaagtactgctattcccaccgtacagatgaggaaacagcctcagaggagttaaaacaagttgctcaggttacaccgtcagcggtttggactacttcagtttcagataatcactgtgaaattttactgttttgagctacacgtttcaaaatcttttctgatgcggaactatcattaaatcatataatccgcttctctggagtcagaggttgacaacacattagcacttgactcgagcctctccctggaggaggacattccgtctgcggggagccgagtccgaggctggagcaactctggaaccacagccctccagtagagggcacacgagagcaggctatctgtggagatagcctgttggcacaggggtgaagatgacagaggcgaacccaagcaaagagagttaattagcagagtttgccctccaggctcggagggcaagtcagcctggggacctggagttagttcccttttcagctgtgaccattgaagacattcatcaagttctctggctccgggatgtcagctgtggtagtgacttgcatgggaggttatccgacatacctcacacactttaactccacctcttcagagtttgtggccaagaatggagccaggtggctattttttttttttaaatttatgtaataacaaacattcgcatttattgaaaacttaaagtataataaaaaaataaataaaataaaaaaagaaaaaagaaaacttattcctgtgtcaggcacttttctaagtgctttgcagtgtattgtctcatttaatagttgtttaaattaacagagtaggccgggtgtggtggctcacatctgtaatcccagtactttgggaggctgaggcgggtggatcacctgaggttgagagttcaagaccagcctgacaaacatggagaaacctcatctctactaaaaatacaaaattagccacagtggtggcgcatgcctgtaatcccagctactcaggaggctgaggcaggagaatcgcttgaacccgggaggtggaggttgtggagagccaagattgcatcattgcactccagcttgggcaaaaagaatgaaactctgtctcaaaaaaaaaaaaaaaaaaaaaaaaaagagagagagagtaaataaaattgtaaggtgaatatgttatctacttgatggaattttttaaactaccttgaaaagttttatagtttcctatttacagatgaaattaacatactaattataaatcatgcctcactattcactttaggcagtctatctccttaaggatctccttacggtttagatagataagtgaattgcttaatgtttttggaagtaataaaactgcatttctttttaattaaacaatccagataacaagaagtaattctaataggaaacttgtaggatgtatttacagaaaatctacacaatcttactgaacaatgtagaaaagaagatttaccagcctgggcaacatggcaagctttgtctcttaaaaaacaaaacaaaacaaaatttagccgggagtcgtggcatacaattgtcatgtccacttctcaggaggctgaggtgggaggactacttgagcccaggaggtcaagactacagtgagccacatttgtgccgctgtactccagcctggatgacagagcgagaccctgtttcaaaataaagaaaaagagatttaaatgaagcgaaatgccattttctctaggtgagaaactggaatattatcaatgtcacttcttcccaaattgatttataatttaaaaacaattttagtacttctgcagcttgtttggagcttgataaaatgattgtagagtttgtcttgaagctttaatagtgaggcaggtttaaaattgggggcaaaaaagaaatgggttttagggtgtagaagggacttgcctgatcacttttgctagaaataaatgtccctccaaattaaattactaatgtcgcacatcagatcgtatttaaatccattagaagattttactgttccattagagctacccatagctggtgaagactctgcttatagtggaacctagtttctcagttttccatttatatttatttacctgagctttttgtaaagtagtaagtacttgactgaatttctgctatttatcaaatgctttttgaatagaaataatgagttaataacatttagccttttttggtaaatagtataaacaagatagggcaaatatgtaaactacttagaactttatctaccttgcatattttgtacctcttatttgcatatgcatgtcacatgctccttatgtaccatgtgctattactgtgccggggtactggggctatattgagtctatttcctgtctttgtagacttgatggataatttggacagcattgtgatattccaggtttaagagtcttaaggttcaagactacattaaatgttaatgtagtccaacatttcttgaactctgaaatcctctgagcatcttttcatgcactggcctaaaatgttttcatagcccagcaaaaggctgattacttatttccctcctattgattttttttgagatggggtcttgctgtgttgccctgtctgcttgtgaactcctgactccggtgatcctcctgccttggtctcctgtttatgttttaaatagcatttctcaaacctatttgagcaaataactttcctgttaatatgtagtattccttgaaagaattgaatttgtgagtccctaatctagacacttttaaagaagaaacaaaactcagtaacacatttggataaaaacctgaatatgtccattttgggatgaaaggaagcagctttgtttaccatgttgaattaagtggaaaacatcttattttaatcatgattgatagaaatctaaatttgtaaattctgatttttatgttttttttacaatgaaaatacattttaaatgtcaccatccccttccccatgaagtcttcattacaactaattttgaaaatactctctcatttatttatattatatatgcatatgttctactgtataattttaaatacttaaatggggttatctttttgcattgttctgtatcttttttcagcttaataatttaccttgcttataattattgtcagtgcttgcggacctgctctttatgcatttttaaccattgcataaagctggaatgatggacatgatttctttaatcactccaaattagtcatttagttgtttccagttttttagtattacaaataactctgcaataaacgtgtcttgggtatgcattcttttagtttaaaatagtcttgttccttcagaaagttgctcaataatagacttagaaattcttttgtgctaattactgtaattgctcattttaagatctccttttattgttttcatagtatataatcctaaactgttacaactgaaatagtccttgagctaagaaagcaatgtggcttaaagataggatttctaaatagagacttaaaaattaacctttttggagctgtgacttcctgatgaagtggcagcacacaggctgaatatgttctacatctggatggcccaacatcatgatgctgtgatttgcgagaagctctctgcctgcctaggctgctggaggatggcaagttaatttatttgttgttgggagacctccccctgcccccattaaaaaaattattttgaaatacttgtagattcacatgcagtttcaagaaataataaagagtaattccatgcaccattttcctccaatagtaacattttgtgaaactagtacagtatcacagctaggatattgacgttaatatagtaaggatatatgtcatcaccacaaaggtacacctacttcccttctatctctcctctctccttcatgcctggttacaaactaacctgttctctctatataaaattttatcatttaataatgttctgtaaatagactcatagtatgtaaccttttggaactgaagtttttccatcagcataattccttatagattcattcaggttgctgtgtttatcaatagtttgtttctttttattgctgaatggtattctgtggtgtaaatgtactacattccatgagcatggcatgtccctccatttatttagtttttctttgatttacttcattagcattttgtagtttttgtagtcctgtgtatgttttggtagagttacaccctaagtatttaatttctttgctcattgccagtatatagagatacaacttattgaactcactttttagtttatgctagtttattactaattatcaatacatgctcaagatatgtcaactccttttatttttattaggtgtcacttgctacattttgtggagaataccgatgctgttgctagaaagtgctgctgtcacaaagtgggtttatagatagtaccacgctatccttcttcctaggctagattagaagttatttatgtgctatatgcacatagagtttttgattggtctattgcaaatactatggcatctgaaattttttttttttttttttttttttttttttttttgagatggagtctccctttgttgcccaggctagagtgcaatggcgcagtctcagctcactgcagcctctggcttccgggttcaagcgattctcctgcctcagcctcccaagtagctgggattgcaggcacccgcaaccacacccgggtaatttttgtatttttagtggagacagagtttcaccgtgttgaccaggctggtttcaaagtgctgggattacaggcgtgagccaccgtgcccggcccctgaatcctatttttaagtataaaaagtcttttttcagctctggattatggtgctgcaagctgatattcttctcatggcagtaaacagagaagtcctaggggtaatcttacccctctggggagtccaggatatctgagcatctcccttttctttttactgctagaaagaatttctgctagtagaatttttattttggccaactctgaccccttaggttgatgtcagaatgaggtgtaccaacctaggtggtcagagttggccaaaatacacattttcctgctgagcaatttagtctaggttaagtcatacttgaccatatgccctagtttagcgtccagtttgtgaacattctttacctgagttattgtaattctaatctcttatgtaaaactgcaggtagtcagccctttgtctccttcagttctacatctgcggattccttcaactacagattaagaatatttggggggaaaaacagtaaaaaaaaattacaatacaacaataaagacaacaaatttaaaaactagtataacaactttttatacagcatttgtattgggtattgtaagctagagatggctgaaagtctatgagacgatgtgcatacgttatatgcaagcgctgccattttattgcagagacttgagcatccaaggattttgtatccgtgggagtcctggaaccaatcccccttggatactgagggatgactgtatttacaacatgtctagattttcgacaacttgaattaaaccagaaagaatatgaacacacagaagttcatgtgtatatatatatgtgtatgtgtttagaagggagcaagctgttaaacatgggaaatagttgctagtagtttgtaattttatgattacaattttaaaattcaattttgcaactggaatttgacttgattggttagtgccttacagtaattaacctccaaatcatcagaatgtcatcttgttatttaggtaattgaatctacttttcttgtatacagaatgctttttggaaacaatacactgtatatctagtttgtaccaagaactaattgtacacagtcagatacttgcagttcttttggacttgagtttctttatccttctatcagatgtcacaattccctcttccctttgtagcatatgaaagtagttgtgtgtgcactgtatttgagaatgtcaagtaatagaatctctagaaaacattcatgatttcagtcccaggtaatccagagttaaaaataatgttcataaggaagggtagcaaaatttagattttaatacttataggaggtgtgttaattggccccagggccgcaggctttagcgttcagaggactttagccccaaaggttttgtggaacttttccagagtcctcaccagtacattgggaataaatggaatgcctttggaagtactttgaagattgaattcgatagtgttggtaaagcagtctagcctgctgtgattgtgctattgatgcaaatattctctagcctgtattatttttccttggagctcaggaagtgatccccacccacctcaagcagtaaaggaaagagaggcaggagggtctgaccatgtgaggtgccccaataaagcatctgtattgtaaatcaggaatgtaggtattgggtttccttaaaacaaagcacacctacgtgaccactagctggagcacaatgtgggctcggtctgctgaaagagtcagttggttgcggctgtctaatccaattatggatggtcccagcgctcagcctttcagctgctgcccctcccctgcagactctgcctctctcaccctcccttttagggcttggtctgtggctaccccagaaatcacgtgcactcctaggcttcagcgagtacagccttgttaatctcagacatggaaagcaagttgcctaggtctacagatgagtattcagtttccccaccagttgacctcagtgcaggttttgttggttccagtcatttggggtcagcacctgtttgaagccaggacacttagaacaaggtggaggaaaacctgagggtacatacagtgtggtttccttggctcatctaatgcagagtcagaatgattagccacattgcaaattgtctttactcagtggtttaattgttaaccagggagttaattttttttttttattaaacaaagaagaaaacacctctagatttttctgggacagatggccccattgaaagaggccatgtgctgcagcgaatggccaggcctcgggtgtggcaagtgccttccagctcagtgcttgctttgtgctcctttgcctatttgaagacgtggatgaatcaaaatctataagcctatttcagtcaagtattctaaggaacctggaaacacaggggatttctctgttgcctctaatacagtgaaaaaccactgtctttttttgttgttgttgttgcattgggggaagaaagtccaggtttgcatgtacattttcactcataggatttttttttagaatagtttggggaggacattgtgctctggccaataactgggccagtgtctggtcacaagatgatcaggcaggtgcctgcatgactgtaggacagagaactgggcagctagagagcctgtgtggaacgtgaagcctttccccactttgttgccgtcctaaccttttctcaagtcatggagaattgatccttagacattccttacctctctcacccacttgaggattgctcagagcctgggtttcggattgaaatagcactatttctggttggtgacgacattctgtgagccagcaatgtagtttaaatatccacaagagcgccctggttccatcagcgccccttcgtaattggtcatgagacttggacctccttcggggctgggactcgggcaagggagttgagtagagcttctctttctgggctcctgggaaggattcatggcataaaagtgggacttcagcattctctgggcacacctgtctctgtttttgtcctctcctgaatctttctggcctgcagagcagaataaagtcactctgtgccaacctgacttttgttcatgactatattaggggcatggatagaaagtgcccccatagcactctcagataaaacaccttcaaacaaacccagaaacccatgctcacaaaaccacccaccttaaattatgaaactttcaggctgactaaatcctgaaggcgttggagcgtgagcaaagggaaaatggtgacacagagctttgcccttcctaatccaaatgaaaagctctgtaaccctccccccacctttgctatcaagaaatgttggacctttgggaagcagatgtagagtattgatccttaaaacagagacctctcaccctaggtctcttaaaacagagaccttaaaacagagtattgatccttaaaacagagacctctcaccctaggtctcttaaaacagagacctctcaccactttctaactgaagtgggttccacattggaagtactttgcagaaacttctattaccgcaattacttttgcaccaacaaatagtatcctcaactcagaaggaaagaattggaacactcagctggaggtgtctggtagggacatgtgtctgctttttgaatcagtcgtatatgtttttgttcctgtgcctggaggccctttgtggtgtgagaacattgaatttggagagggaaagggagacaaaagagaaatgggggtgatgcttaagggaaagtagggtttttagtttgttcaccacgcttgatggcagatttgcctctggatcctcaggccacgttcctatggtgggtagggatctctctctctctctctctctctctctctgtgtgtgtgtgtgtgtgtgtgtgtgtgtgtaaatagtgatttctctaagttaataaagaatgtggggtgacctcctacacatgcccgtatgctattgtgtaggaacaaatgcatggtaggaatgggtagactctaatctgaaagcatcaagttgtatgcatcttctgcaattaggaatctgctcaccagcacgagtgctgtggtttctgtagttctgggattcagaggagcattttaaagatgtaggatgttagaggaggaggtgcagggatctccccttgggtaaagagtgggagacagtctctgagtcataatctgggaccagtggaaggtcaaagggaagaactgtcctgttgtctgctaagtcacaggcttccttcctgttctctgagccctgtcacttacccaaggtgcagcaacaattagtgtctgtttacacataacagacatctctttcataaaataatttttaaggcatttgtttggtagaagcttccctgtttgggggagtcttttccctgaatgcatgtaaataacttcacagtttgcgcaagtttgcaaacggtctatactgctcagccttgattgggctacccaaggatgcgcccgccctgctgaggtctgacagctctgggaggccagtgaggcctgtcctaatccctgttctggccggtgattcagctccaggtggaggctgtgcagaaacagccccggtcatctttgtgtgaaatacatttgtcgtcttcattttcttttttcttctgctggtatcttcatggttttcagcaaaactgtgtacattacatttttttctttaccatttctccgtagttatttctagcatttttttttcagctgatgaaagcaaatgaagaatttttatgctccatagtcagtcaaacattgatttctctgacttttaacttagaaagtcattttgcagtggcttgcgtgtgtgtatttagactgtgcttctacaaaaaagcacacgtaggcttatggctcagtttacttgttccagctcactttcctgttcatttaccttcttgtaaaatggaaagacaaacataccttaaacttaactcagatcgtgattgccaactttgttctctgtgtgtaagtagttatattattcctaggttatggcatcttgatttatctttgaaagaagaaaaccctcactgagttgacagggacacattgttctaggcttctacaattgtgctgatgacgctttttcccattggaatgacagggatgataaggtcggctggctagcctttttttaaaatgtagaaaaccacaactttaatttatagcatcatcattttccttatgtatgtagtatgtttcaaaaataatccaatgtcagattcttgcttctgtgatcaaggtcttgtttttgccctttctttgctcaccacctccctgcccctgacgccgagtcctcgccttagaggaggtggtcagcttatattgcaacattgaaaatgttataccttacaaagaaggtgatatgccatttcttaattataatgatgtgcaacagtgacttctgatgtagacctttaacattgggccacgcagctttttctttggaggaggggcatttcaaattggatgatgctcttatagtttaataaagaaacaagcaaacaaaataggctatacagggcatgtgttcttaaactctgtgacagtggaggtgaacccagggccctttcatggccttgggagggtcctcagctttgggggcgagttatctgggtggaaaagcaccatgggaggaagaagtcagagaggcgggttgctggagctcagagaataaaagcaagtctctgccctgaaaatggccctgatttgcttcagatgtactctgtctgccaacatttagtgtctgtgacttagccaaaggaaatgtacattaactgttcagtttctatgtagtttgtgctctaggattttgcctccggaggatttctgtgaaggaagctctgttcaagtggctctgttccacttgggtttggaaagaggccgggacaggtgatttcgaaggaaggatgaggacaatggaggagatgggcttggtcattgcagtgtgtgaggtggcccagcttatctggcattttggggtactatatgtgccatatgaggtgggtatgggtgtttgaagggaaagggggtggcctgggcaacttgtgtccttgcctagaaagatcatcactctttttatttaaaagaaacatgtgaaagagccatcagggatagttttgtcctccctcttcttacaagtgatcattcccttggtagggcagtgccagaccctgcttgtgagcacagaaaacgccataagctcctcatgaaagcatgtctggggaagcttatctcaaatgcagtttgcacttgcaaaggtcctgtggtatagcgggggagcaggggagatggagtctgggagcggtgaaggctgggtcactagctggctttgtagcctctgggcgtgttgtttttatcctcagaggggccactgcacctgctccatggtctcttcccacagcagacccttctgtctctgtgcctcgaggggctatgtggaaagcagagaaagactcaaccagagtcttcccttaaggaaatcggaaggaaaacaaaattaacggcattagaactgagtatgtattaaaacttctactgtcttacaaaatttagttttctttcttatttttctttccatgttgactcagtaggtaaatggactaaacacacattcatttagggcaggaagaacttcatcatttgattacctttagttcatttaccttataatgcctaaaacaaagcagaaagtgacgttggttaatcaaaaagatcactttcttttttgtgttcttttgtgctattgtgagatgcctcttctccagcaagctgtagttgttcacaaagtaaagctgttcctaagccttcattagattgaagcttgtcccagactttctttaaagaagtttgcatagcttagttcatgctcagatgattcagtgatgatgatgggttgttggttagaaattacttaaaaatgcctaatacattattgactgataaatgttaagacatattctttaagggtctaaatcctattcttgtggagctgcaaagatcttgggggtgtggttgcccttgtctgttgcatcatctttcaaatgcaacagctgtaatgatattctgtatcttgaaaaacttaaaaaagcaacaactaacttatttgtatcttttcctctaatatttagtttttacttcacttgtaacttattacatgtattaaggagtttatttttatatgacattttactcataaaaggatgaaaccaagattggtgatctgttcacatagattaaaatcctgtttgtgaccacttaggtgtgtaatgtgtgacttgtggactgtgtcagaggaagattttccaaccaaaagtacccattggtatcacagatgaaaagtccttataccatctgaaaaaaagtagaaggtggggagaagcttgaaaacctaaggaggccattaggaaaggctgtatattttctgattccgtttaaaattttaagttggtgaaaatactatgtgatcgaaggatgaacatattttagtaaatagagttatagtgctacaatgagataaatttcacaggtaaatgtgacgtagctaatgcataatcattctttgtgttgcatggcaattctgtacaaatggaaggtagcatgtttaacgttcctgttatttcacataaatacagactgagagtttcagtggtctggtttgaaagggaagaaatagaagaaggaaggagagaagttggcagaggagcaatctgctctaatatcctccagtacacaatctagctataggtcctcacctggcagggtttgaggatcagaatggtggctcaggtttagacaattctccctgtttgtggggcccagcagctagttaagagaaaaatcttttttccttccctattaccctataaggtccccaaattcattgtatgtagaatacttgagtcagaataactttcctaacacttaggtttcaggtttgttaggtatgcctgacagctctcttatcaactcccatttatttgctaatctaaatgaaagtttgatggtagagtattgtaaatgtagggaaggtgaagtgttcaccttcagatggtagctatttatctcagcaagaagagcagatgactaacacccaaatacataaccattattatataacttagcatttataaggcatttctatgcatcctgagagactagagcactctcaaatgaggtttcagagtaagattaatctttgcaaatgaagacaaattagcaaaatcttcctatttttaaagtgtgccttttgatttgatacctatttatttgtttggaaagaagcttttaaaatcaaaaccatgaatctgtggttatcttcaaaggataaattatggtaggtggttgttacccaggttaccattttaagatgattatggctggcccaaattaggggatcttttcatatatgtattatatattttaacttcagtcttttaaaaatgaatattcctaggtggcatgggagggtgggaaggtcaaaagcccaaacttctcttacttattggctgcttccttgaacttagcgtttttcttttggaaaagtgagcttttgtttttggatattttgtactgatactctgtgcctacacagattttgttttggttcaataagagttgatattttgccaggggttgcctcccatgagattccaaatacagatgtaagtttaacaggcttctgaactggatgtttctatgcgctgaaactctgtaaacgcgtgtagctttgtctaccattgtatattgctgtattgatttgttgggttgttttttttcttcctcctgaaaagctctggtctgtcctctgctgatacaaagactggtccattccccagggtcactgcaagagaacctccagggcctggccactgttagatattactaatctgtgaagttgctccaaattctcttgccccgatcataaagttccattgagttcaattttatgtgaaggttctttgtcaaaaggaataaatgtttattcaacagatccagttgttgtcagcattgacagatgtgaaaattagcaaatagcaagaagtctcccctttagaaaaggaaaacaagtacttaaaaaaaatcttgtgttgtcaataaacaagtccattttaaaagcatctttgaaggtgtgtaatgaaaatggaggccttaggttgtatcagggtttatgaggagccagcttatatgtaatcagatgttcctgttactgttatcactgtagtatagggcttagttctgccctttaagtcacagactcaagttactcctgattttaccagcagtcagaatacatttttctttaaaaggaaaagagacgatatcccagtgcttctctatactaaaacaggaagagaagcttccttgttgaagtgacagtttagatgttgttattttgacagaaatattagtaaatatgtcacattatcccttgctaaatatttatagcatagaacgtatactctgatgcataatattttatgaaagaaatatcttttgcctcaaatccctttcactgttttgacatgaatctataatttatacccagaggtctgcaggaaaaagactttattaagacccttttatttcagccaagataaaactccatcctaagagggaacaccctggaatctttgagacccttaaaggtggggtattctgaaatacctgtgttcgttcctttgctagaatttagatagcttcacttttgcaaaaaggcacaaaatgagggcaatttttgatggaaaattttagtttttgagatgaagcagggggcacagtggcgaagcgccctatcttagcacttaggtagcagccgtaacaagtgtcctgggtattcctccctagaaaggaaatgttggtcacaaatggcagtgtcctctgcattcagttcagctatgtgactgaaagacactgttcttcagcagctgtgagtttacaagatgtcgcacattgagtatttttctctagcttatttagaaacgccagtctagacttccgcagttttggattcgtggccatagttttggcctttattagatggccctcaaaggtacttttcaggtggacattgatttcatgccagctgtcagagatgattttccctagaaatggctgggtatatggagacattctgtattagaatggaggtatacacccatctcttctgtattagagagcaggtgttgccccccgtggtgctcagattgcttagtgtgagaaggaaaagaccagtgataagaggaggaaaactgcgccttccatgtagctcagttaacagcatcatgattctccaggatggccccatttctgtttttatttacaaaatggacttgagaattaattagtaagcaaactgtctccattaggtaagtggcattctgatttgtctgtgtaaagttccatttcccaagtaatgtgttccaaagcatttttatgtacaactactggaaactgctgtacaaatgtttgctgctatttggttgtaacaaaatcagtaatgagtttcaaaatggaataatttcagagcccttcatctacagtagtttgggaaacacttgaaataccaagtgatctgaattcactacaagctctccaactggaaaatgtgcctggtgtcgtcttcaagcaagaatcccccgccccttaaccactgctgctgtggacttgagtcttcaaccttgttttgtagactttagcatttgtattgtgtcatccttgacacctccccaaccccagccttcccagctttgattgcttaccttagcaatgctctcagcttggaccagaaggcacggatgtttccctgaccttaacctcactgtgtatcagctcaaggaagaagccagatttgctgatgttgtaagcactaaattatgttcataacatttaaccctcacatccataagcaaactaagtgggaaaatattgactattgtagcagtcatagattgtttaggaagcagcaaaaaggcaaatttttctttaaagttcaaaatggggcgaaagagggtaggaaaggaaaagtttattaagaaaattgtatactacattaatttgactttgccgtctagacttaaattaaattcatgtatttttttggtcttaacacattgacatgtatcagtaagttaaaaacttaaaaatacacaaatgattagattagcattattatgtgtttctttcttgttttttgttttgttttgttttgttttgttttgagatggagtctcactctgttgcccaggctggagtgcagtggcatgatctcggctcactgcaagctccgcctcctgggttcatgccattctcctgcctcagcctcccgagcagctgggactgcaggcacccgcaaccacccctggttaattttttttgtatttttagtagagacagggtttcactgtgttagccaggatggtcttgatctcctgacctcgtgatccacctgtctcggcctcccaacgtgctgggattacagtcatgagccactgcgcctattatgtgtttcttatagaaaatctctctaattttttaataagcatgtttttacaaatgctgtttcctgagaactgtcgcaccacatgcgacatgccatgcatgcgactggaacatgccagatatttgtgggtggtcccttcgtgtcacctgtgccttcttaccaagtaatttgaaacacccgtgtaaactacctttggcaaataggatagctaaatcaccgctaagatttataatttactttttggatatctgaaacatcaacaatacagccatccatggcgtgttcctctggagtgtggtccgtgccgtctctgcctgctccatctggctgatcccaggcaggcagctcagctctcagcagacacagatccccagcacatatgaacgtgaaagaggcttctccgtgggagcgaagtggccagcaggtgtcacaggctgtgtgggcccagcatcgtgtgggcactgtgctgggggaatcccatcacagcatgtgctggcgttagtagtagactgtgtgtgtctcagagggtccagaaagtaatacagtaaaggcgcctgggggtgtgtgggggtggttggttggggtttgcttgttagtttgttgtaaaagcccagcttttcattcttggaaagatttcagccaactcgagagggttacctgccaggaatgctgcagaagcaagaactcagtgggtgagcacttccatttcttcaacaaatgcttctgagtccctgacctgtgccaggtgctcttcttgagctgagaatcctgcagggagaaaagagataaagaccccatagtcctgtggtttaccttctaatgagcatacttttgtcgatcaaacagggtgacctctctggtgtctctgcacactacctgtatggtctttgcgtagctgatggggtctcctgactagtgattggtgattttaatctggattttgccacagcacttattttctaacatatgacttaatttacttaataattgtgtctattgaatgtattcttatacatacacacaggcatgcacacacggacacgaatataagctttacaaggacagaaaccttatcttttatttatttcttccttgtgtatcctgagcactgagaacagcctggcacaaagcagggctcaggaaatgtttgctgaatgcatgttcacactggatgtgttcgaaggctctcactcgcgactcctgttggcttgtggagagtgcatctagctgtaaaagccatggtgcttggatgtcttggggtgctgagcctgttcccccctcatttgggggtgtggtgctatgctggcgtttgggtccatgccccgcatttctgatggctgccccatctgccctgtgtggggtggcagagttctgtgtacacagagttacatttcgttgttcctggcttctctatggatgacagcagcactgataaatgccacacctgctttctcagcagtcttgcggggtgatttttcctcttaaggaagtcacctgatgtccatgctgagtaggaaatgcatccaaagctttgggagctcagtgttggcccctgggctgcagcccgagccccgttttagagctgtgtctcccaggcagctgtgatgactgctcgaaagcccactcagggggaaggtaaacctgatgcccgggtgtttggacagtgagcatggcgagtggaccgttacctgtgcatagagttgttcatatgtggtgacagatgttgggctgttatttagtaacttcaaattgtttttctttgcgtcggagccatgtctaggttctgagtgcttctcccaggtcagatggagagctcttcatttggggttgggggagcggggtggtgttttcaggtgcccaaggcattccatgcacatgcacctgcagggtatgtgtcatctggggtaagacagagccctcccggttcctcttctggatgtgtgcttttagtttttaaagaatgtcagtatatacattgccatttattcaacaaatacggactgagcattctgttgtgctgacgtagctacttggggttacagagacaaagccaactccattctccaaatggaaaacaaatggaaacattctagtggtagaaacagacaacaaacaagtagacagaaaataatgtcagacagtggtaagtgctatgaaaaaaatacagactcactgattgtgatggagacttttaagttggattctcatagaaggcctttctgaagaggggacatttgccctgccactgtgaatcagccatgagaagacgtggagaggaacatgaggtggtaggccccagcgagggaaagatctccatgatggcatcgattattcgctccacaaatattattgagcacctgctgtgtgccaggcactgttcctggtgtcagggttatagaagtggacaaaatgaggcctctgcctctgtggagcttttattaaagtagggaaggggatgggagggctgggtcacatgttaggtgtggggtacagggtacgtggtgccaggcaggtatccgggtacctttttacgtagggtattcagagaaggtctctagagaggtgacatttggacgaagacctaaaggaaagggaagggaaaggcgaggagcttggagagcttggtgcatcttggtgggggatggggtaaactgagtcagttatgtagggccctggaggccacggtgaggacttcggctttgactctgaaaggagatggcagagtttggagctggtgtgtacgttaacaggaccatgctggcagctgcgttaagagagactgtaagggcaaggacagaagtagagagaccagtaggagtaggctgttgccccagtgtagggcagagaagatgaaccttagaccaggatggtggagatggtcagtggagagaagtagtcagagtctggaagcaccagcaagactgtctggtgcacacaggatgcacgtgggatgtccagtgaggaggatgagatgaggttgggtggctggagcctggtgagtgacaggcagagagggctattagatcacatgggccctggagccatggtgaagaatttggattttgttctctgtgttggaaagttagcagagagcttatatggggggtgagatggcatagggacaatgttaataacagcaacgaatatttattgagcacttactgtgtaccagctgttgcaacagcctctcaagggttcgttctgctattagagccatgttataaatgaagaaactgaggcacagagaggttagctaacttgtccaagatcacacagttagggacaaacttgacagaattatgtgtgtcctggtatgtatttcagttttctttagggaaggtaccacaactttgggtaactatgcccctaccccaggatttaagatgttttgatggttgaagggcgatgtttaagagtgggaccagagaatattgaggtattaaaatctcactaaatctgtattcattatatctgtattcatggtataattcatgtgcctccccctttcgtgagcccctcaaacatgatcatggatatgttttctccacccgtaaagtacgttcatattcatagaaaacccacagagaactgcagacctgaaggtttctttgtaagagctttcattggatagctagaagggctgcagtaagtttaaaaaaaaaaaaacccaaaccaccctggattccaggctgcacagcctctaggaggtgtgggtaatccctttataaagcttggcataatttctgttaagacttgcttattttgctctcagcttgctatcttgatatgtttgcctttgaggaggttagagttattgtgatttaatcacagaccatgtatttcgcaagattcatttggtatctccagcttgttttcttgtttcctcggctgtcagtccacaggcagaggtgggaggcggccggcatgggggaccgagtgtggtagaaaggagtgtttacttagcggaggggagtgctgagggctgctgttaccttcccagaatggctgatccccagcagtgatgagcaggctgggatcgtggtgttaaatttggtattttctagaaatatatagcaggctttcccctccacctgccccccttcaaggtttcgaagccttgtgttttgcaagagttgagaggggaacagttaatagcttggattatcttgtctctggagagaatttatgtatcaattcaccggaagactgctctggtattagggcaacaagaatggttttatttctcccttcctttcctgcactctgttcttatgtaattcttgtattaaaaccattcctggtaaattagaacatgctcttgtatttgggccctgctttgaagaaggctgctgagtctaaaaagtttggtagcctctcgtttctcatggtgatttctgagatttctagggacttggtgttttacagagcttgttgagttgcacaaaccagcctccttggcccttctaggtgataaaagatgctgggctgggagggcagctgtggaaaagggtgtgggcgagggagacagtgcttcatcctgcctggatgaagcatgttggttgttggtttattcataaattagaaaaatatattaagaattgaagttgttccttatctcataagatttctagcaggctgcataaagtctgtagatggtaatatccatttaaaagtggacaatgaaaaaattacctctttgggagttgtgttgctatctctaccccaatttggcaatctttaattaacttggcaacccccgttttaccaacaaagaacaacctttgattaaaaaaaaataaaatgtcagggagtgaaagatacggagtgtgactcagcagatgggaattcctttaataacacgctgggtgttagcgttagaaccgccactgaacagctctgcaggatgccctcccagccctccctccacctatttggattagaccaggagactgcagcaaacttctcaaggggaggcgaacttggtgttggtatctgagcgattgtctgtttcaattgtttccctctgtcttggaaaacaccggcacaaaacacaaatccagtcccagttcctgcagctgctggggcgaagcaggctttttatgaatgaggcccagaagggggaggagagggcttgtgttacagcagcagttgggtaatacatttcattcacttgcagccatctagcccaggcttcattttaaaggatattgttcatttttggcaattcagattagactttttttcttccttgtgcaactgttggtaagttagaacacgaagcatgtgtgtgcattctttttgcttgcttttttgagtgtttgctcctttagttgggataaatggtaggagaggtaggaaggctttgtcatccccggggaccttgcttacttctccctcccagcaccacttaagagaagaggaggtggcctccctctccccaacctcagagccctcaaagcccttgatagtgagcctgagcacttgttaggaggtgacttctacctggggtgtgctggggtccacatgtgccagtctctctgccctgctccccgtgagcggctctttatttgtggcccttgaggccccattgttgtggccaccaaaacctgaattggaagctgtgtgacaatgctggtccccctccctgcactgcttcctgctgggggcagaacaaagagagcgggcattgtctctggcataaatgaacctctatcaaaacaaacacccagagagaggggcagcctggttacagctgcctgtgtgagcctcgacagtgggcctcattcctcacaaagggagctttgaggcccggaagaggcctttccttgatgatcgagctgtgcacagggagcaaaccccaagccgactgcttgtctgtgccaccctcaaacaatgatttccccaaattggacagcctgggtttgtatccttgagcacggttttgggaagagcattctgcatgaggcattgtagctatgtgtatggagtataattctgttttcaggttgctctgccacagaggttaagaactccctcttccaaggtagacattgagaacagagacgaccacactgggttttcactgcagcttttaaacaggatgactcccagcccccatccccgtggctagcagcaagcagggactctgaaacactgcaagccaatggactgagcatcttacttttgctgtccgtgttttggtgttttgtaaacccatctggtaatgaccctgatgccccatgtcccagcaagggcataggtacctgccattgtgcaccaaagtccctttcctcatggccctggctgttctcctgcatggggtcatgtgtgtcccgttaccaagttgtggccccttttcaaccttgagtgccacatctgggctgttgtaggcatgggtagtacaagctgggtttgttactctaaaaatgaaagggaggatcagttgttaataccttcctgtaggtgcgagagggaatgagttgaggattcgatcactgtttatagccagtctcggatcctgattgtgaagtcattctttctggataataactactatatccagcatcttgagagtataaaataaaggcacatgttgtacgtcatctctgagatgtagcgatggcttggactttggaggctgatgagagaaaactcatggtggtgagctggagcagggtgtggctggcggattctgaaggtgctagccctagttttacagctgaccagggaaggtcattgaaccctacagtcttggccctgagagaaccttggaggacttaaggatggagaaaggtgacaaaagagatgcaagccaacagcaattttgtggaacaaagtgtgtacaggatttgaacttaactctgcgaaagacaggggttgcttgtatgcacgaattcacatctgaagaatgcatctgattgtggctgcaatttctgtggacgtgcaaacatctacctgtgcattttatttgtctagcatcattgaaagagttttttgcttgagttgatttcccaggtaattgaagcttacttctcaaagcacaagatattttttctcatatattagcggtcttaagtgagtgagacccctaagaattcttaattcctttatcttacttttcctacaggaaacttattatgttttcctagataggaattgtgctaccaaaaatgaaaagtaaacgtaatatgtaatgttctactggtaattgtttccattttaggttgacaccgaactaatgatatttaaattgtagctgacttgaaacacagtgaaaaaatggtttcctgctgtttttttaaagctggattcagtaacatgaaggtaattaaaaatgtacagatctcagtaatagacagtcatatgttgcttaatgacagggatatgttctgagaaatgcattgttaggtaattggattttatcattatgccagcatcatacagcgtactttcacaaacttagttgatacagcctactacacacctagggtccatggtatagcctgttgctcgtaggctgcaaacccgtggagcatgttgctgttctgaacgctgtaggcaatggtaacacagtggtaagtatttctgaatctaagcatagataaggtgcagtaaaaaatatagtgtaaaagataaaaaaatggtacacctgtatagggcacttactaggagtcaggcttgcaggaccagaagttgctctgggtgagtcagtgagtcagtggtgagtaattgtgaaggcctggataaatactgtacacttaggctacacttagtgaatattacattttatttatttatttatttatttatgagatagggtcttgctctgtcccccaggctggagtgcagtggtgcaatcacagctcactgcagcctcgaccgccaaggctcaagcgatcctcttacctcagcctcctgagtagccgggactagacgcacacaccaccatggctgactaatttttgtgtttgtagtagggatgaggtttcaccatgttgcccaggctgatctcaaactcctgaccttaagtgatccacccgcctcggcctcccaaagcactgggattacaggcatgagccacggcgcctggccacagttaacttttttaataagtagaaggtgtacactcttaaataactataaaaagtatagtaaatacataaaccaataacatagtcacttattatcattatcacatattatgtactgtgcactgttgtacgtgctgtacttttatacagctggcagcacgggtttgtttgcaccagcatccccacaaacatatgaggaacatgtacatcttaccacggttgcaatgtcactaggcaataggaattttctagctatattctatccttacaggaccactatcgtatatgcacttcatctttgaaacgctgttagctgcctcatgactgtatttctattcctcagtcatgggctcaccatgcagtacacatgtgtggtcactggagggaatggaagaacactgaggaaatgcatagcctgtttcatatatttattacactattatttatttagaggaatgttaagaaatcttgcttttatgtagttttagaatgccatgaaatatctagttggggcattatctgccattttgcaaggtaatcttccacttctgaataacgttacaagtaacccgcgtttggaggactgatttgggactaaggcaaggaatttaggaggcacaagtagaggggaagaaataaacacatgacttttgtttttgtttttgtttttgttttttgaaagaaggacagtggtttgcttgttgattctgctttgagaggatggggatgcactccagagaaagtgaaacggggctatgggaggaagagagcagcgcacacacagcacctgcatttgattgtgaatgcgattgtgactccttaggcaggaaggagagtgctaagaccgtcatcatggacactcagaaaatacctgctaatccgtttactggaagatacagggagctgcagataattattgttttttaagatggagtttcgctggagtgcaattgtgcaatctcggctcactgcaacctccacatccccagttcaagcaattctgcctcagcctcccgagtagctggaactgcaggcgtgcaccaccacgcctggctaattttttgaatttttagtagagacagggtttcaccatgttggccaggctggtcttgaactcctgacctcaggtgatcctcctgccttggcctcccaaagtgctgggattacaggcatgagccgccactcccggccgctgcagagaatttttaaaataaatgatagattctcacagataagaagtacaggataattatttgccaaagtttgaaactgccattatattcaaaggcattctcttttgggagtggttttatatttaaggtttgaatttagatgacctcaatcttgaggtgttatcggagcattacaggggagtcttatatacatgcaggtgcgatttaatttgaagatacttccatttaaactttatgctgccagagttggccagctaagcaaaaagaattctgataggtcttattctcctccccatcccacacgctgattttttttttctttgtgtttggccgaaacattttacatttctcatttttcacagagctactgtttctctaggattgttttccctgaagtgtgtaccctgtgtttgggcagagcagcaagaccagacttccaaatggcatgctgcgttttaatgtgctttcataattgtctgttccaaaagggtgcctgtgtgtgtatggtgtgtgtgtgtgtgtgtgattcagagcacctgagagcacactgcccgttgtcccctccagcccttctgaaatgcaggccaccctttctgtttcagttgccccttgggtggcagtctgtgataactcaaggtcaggaggaagtatttgttttggttgtcttgtttaactaattaaatctttaatcttggtccttaaaagaaactaaaataaaatcgtaaagtagttctgataagtccttgccataaattattgcttttgtaaacgcacataaaggactctgaactgttgctactcataacatttctgacgccaaatgtgtggggttttgccataccaacaaccagttgtctaactctccagacaccaactgggggccttacaattcagtgcagttctgacactcaccacctggagttagcacagactccacagggatgagggttcagtcccacgagtctgcccttgctgcagatgcgagtagcaggtatggggtgcccacacttctgtctgacttgcctgaaaggttgagagtttgttgccaggccccttgctttcaggtctgataacttgctaggttattaaacctgaaacttgataacttctgtagatgttgaaattagaacggcctcactcacctgggctcacaaaattccagaaagtagttgacgtcctattactggtttaccgtgaaggctctatgtccagagtggacaggacaagtggaagagtggcacagggcgaggtgtggggggtggcgtggagctccttttcaggagtctctaagaaggtgggactccagcggcaatgccttgtccatgtgctaagccagccgagggcgcacgaagtgctgtgtggtgtccaagctgacttgggagggacaagtttggggccagccccccagcctcccttgtcatgtcccacctctgctggcatctgtgggcttaaagtgccttcactcccatccttttcaactatttcttgattaaaaaaaaaaaacaaaaaactgttgaatagtaggagactctctctctcattggtatttgtgggaataaatattaaataaacactttctaataggtgttaccaggacgcctaaggaaattatctcacagagttttcaacactgtgaaaagagaagctgactgccagggagagatccctttttcctagtccttgtgaacatgtgctggacagccaggagtggcactgtggcaagaaacacccgttctctggcattagtaagagggatatagccaagggtatctgtataccagtgttaggcccatacatccataaaacattgatgtgagagctttagggcacagctgaccctaagcctaacgtgatcattaatgtcatgaaaattggagaattggtcaggcgcggtggctcacacctgtaatcccagcacgttgggaggccgaggtggatagatcacttgaggtcaggagttcaagaccaacctgggcaacatggtgaaaccccgtctcaaaagaaaaaaaagaaaagaaaattggagaatttataacgtctgatgtgacctgttctttaggtgttgaaattagaacggcctcactcacctgggacattcttcagctcacgccctgtacctggcttacagttgctcagtgaaatgctttcttgattgtagcatggtgggatttttataaatccaaatgacttagaggtaggtgtcacatttttagcagctaaaatcatactaatcgtaaagctcagattcctgtaagtagggcgctgagcacaggctgcatcctggatatatgaatagatgaaccagatcgtgtacatgtgggacacgttctttgtcctttgggactttcttttgcttggatgttggtagtaaccatgtaagttcgggcagctttctagaaactttccttgttgtgcaacattatgcaataaatgcactgctttgtgatatctgagacgttttggttttcttcagcttgtttgagttaaatttagactcctggcatagttttaggtttgaatgcattctctgagataggataaggaccaaaacatccactcagcagccagatgggattttatccttgtgctgccatttttgagactcatgcctctgtttcactctctgtaagatggcattaatagtgagggattgttgtgctgtgaggtttaaatgagctaatccctgtgaggagtttacagcagggcctgggccatagtgaaacactgtgtatgtggaagccacttcacttttgtcatagctttgttgtcattagtgtataccctgtctccttgccgtttatgggtccttctttcaagcagtcggattttctgtctgacatagtataagtttagaggaaacaatagcagctgtaagataatagtaattttccttctgaaatcattttggtgaatttagtcagaatatctgatccataaactctcattataaaacattgccttatgattggagttttttctgagaacagttccaatgaacatgattttttggtggtgaggtactatttctgtgcagtaatgaagttgtgaggacacacagataccacatccatgttgtttgggaattgtttgggaaaggtacgtgggatagcctggcatggggaagaatgatgttagggtattctccttgaggagctcagaataaccaaaggtaaagcatttggtggtataagatatattcatcttaaaaataagttgaaaataataagatactgggagatgttagccaccgaagtaaataactacagtgaaatagctctttattaattttgaaacctaaagttgaaagagttccgtattatttgtcagtatctttatcctcttcaaaaatgtttccagctttgggataaattgtgaataattgtttcactttgttttttaatattggctatgtagtgattttgcattgaactgtgatataagaatgatcatcagccccttgagattactgtgtgtacctgtgtcaccagtggcatataggggcttaaaagcaagtaagtttaatatatacattcattgagaacacactgtagactgttaggattttcggtgctggagccatagtgatgaatatgacaaggccctcacccttgaggtgcctatagtcgtgtggaacctaggtcctcgcagggactctagggcaggtatgttcttgaaagatttttttttttttctttttgaagagacagggtcttgccttattgcctacactggagtgcagtggtgcggtcatagcccactgcaagctcaaagtcctgggctcaagaaatcgtcctgtctcagcctcccgagtagctaggactacaggtgtgcaccaccatgtctggctaatttttatttgtattttatttttatagagtcagagtcttactctattgcccaggctgatcttgaactcctatctcaagtgatcctcctgcctcagcctcccaaagtgctgggattacaggcatgagccactgtgccctctgtaaaagattcttatcaacagttaaaataagaagctgctcaagacatttacctatcctgaatgtttcaggccctcaaggtgccaggtagctgcaatatagttctagtgtagaaaagaaaaccctgacgaggtctatatattccaggactctgtctgaggccctttgacactccgggggcaccctgccgtgaccctgactctttcctgcatgtactgaggatggaggtagcctatgggtggcacagagatttgctgtctggctagcagtacttcagggtactgggtggcttgaggacctcctgttagaagcttggattcacttttcccaaggcaaccacgattggattctattagttctgggtcttgagagcctgcaagggcttccttctgcgaaggtgagtctgggagagacgccatggagtcagtgtgagttctgcagcctcccaagttccgctggcgtgagaggcttgcctggtgccagggctctgggcattgggaacattgcctggtctaccgggcaagaaacgtgaaccaccgcagtgaactggcagcgcgttggcatttttccctccatgtttttataaaaccgctgagtagacaccagattataaatcctgtgtaaatagtcttgaagagtttctgggttcagccccagagaagactggtttgggttttgaggaatacttcaagaaaatgtttgttggttctgttttccaacgtaaagtgctgcacaaggactgtgctgtgagatccaggagtgtcttttcagccctcagtgagtgcctgcaggggacacagctgctttggaggaacgtggttccggagggtttcccactctccatcctagttgctaaagtcacgttccacgtattgtgttctgatgatagaatgaaagcccactccccgcaccctggggtctaggtggggaaaggagaggtgtatatgggatagccacggggtttggcatgagctcagtagagacagcaaactgacccagacagactcccgctttagggaagctgggatgaactaagtgaaggtgggtcatgggagcaatgctgaaccactttggtggttacagtgaaggctgctacacacccagctttgggaggtggggcccagggtgtccagctttgtagaaaggcatggtgtgggggtggctggcggagggggtggtgggtggttttcctcttgaatctctgagaaacttgactggtgtactgctctctgctttcctaaggggtccgtagctgtgctggtggtttgcttggtatctgtattacatccactctgtgcttcagcctgtttgtccagttactgtgtctagtgaagctagcattcacatattttagattaaattccacactccacccccaaattaaaaccctgctatttaaggtaaaaataattttaaaatgttttattttggtctctttggataaattaatcttgaggaaagcaatacttactgaatgttgatgtgtgtatatgtctttctctttgtaccatacttaacaggcaagtaactctcttgtaaaatcagattctaaatgattttcttttcttttcttttttttttttttttgagacggagtctctgtagcccaggctggagtgcggtggcgcgatctctgctcactgcaggctccgcctcccggcttcacgccattcttctgcctcaacctcccaagtagctgggactacaggcgcccgccaccacgcccggcttatttttcgtatttttagtagagacggggtttcaccgtgttagccaggatggtcttgatctcctgacctcgtgatccgcccgcctcggcctcccaaagggctgggattacaggcgtgagccaccacgcccagcctctaaatgattttcttaagtgtaattcaggagttggcaaactacagcccatgctgccacatctggcctgccacacctgttgttgcacataaagtttcattgagtcacagtcatactcatttgctttcatattgtctgtagacaacctagaatgttagaaaattctttctctggctggacgcggtggctcacgcctgtaatcccagcactttgagaggctgaggcggccggatcacctgaggtcaggagttcgaaaccagcctgaccaacatggagaaaccccatctctactaaaaatacaaaaattaaccagatgtggtggcacatgcctataataccagctactcgagaggctgaggcaggagaatcacttgaacccaggagttggaggttgcggtgagccatggctcatgcatgtaatccttgcactttgggaggctgagacgggcagatcacaaggtcaggagatcgagaccatcctggctaacacggtgaaaccccgtctccactaaaaatacaaaaaaaaaaaaaaaattagccaggcgtggttgcgggcgcctgtagtcccagctgctcgggaggctgaggcaggagaatggcttgaacccaggaggcagagcttgcagtgagccgagatcacgccactgcactccagcctgggtgacagagcgaaactccatctcaaaaaaaaaaaaaaagttatttctctatgtaaacaaagaaaactctccttccttataacttgtatgtgttgggtctatttgtattctgtgaaccataagaaataagtcaactatcagctgggcgtggtggctgacgcctgtaatcccagcactttgggaggccgaggcgggcggatcacgaggtcaggagatccagaccatcctggctaacacggtgaaaccccgtgtccactaaaaatacagaaaattctctgggcgtgttggcgggcgcctgtagtcccagctactccggaggctgaggcaggagaatggcatgagcccgggaggcggagcttgcagtgagagatcgcgccactgcagtccagcctgggtgacagagccagactctgtctcaaaaaaaataagtcaactatctcaaggtaattacccttttgaatacttgaggacatcttttctgtgccctctgaatatttccttccccagataaaatatttctagttcttttacttgttctttgtttcagagttttaagtctccatttgataaagtatagtttaatagccttcgaaaccacatcgttgagatttaaaaagccctccttgagagacatgaccagtagaaatcataccaggaccgtttagcaccctaactctgggagccatggctcttgggatgcggctgaagattgtgttatcgtcctgaagctctcttggacagctgagtcaatgactggaggtaggaaagttccttgaactctttcttgtgcccttccagctgtgagctgtgtcaccattgtattatttttacattgttgttgttcttgaaaaagcttttttttttttttcaaggcagagtcttactctgtcgcccaggctagagtacaatggtgcgatctcagttcactgcaatctccgcctcctggtttcaagcatttgtcctgtctcagcctccccagtagctgggattacagacgcctgccaccatgcccggctaatttttttaatttttagtagagatggggttttgccatattggccaggctggtctcaaactgctgacctcaggtgatcctcccacctcagcctcccaaagtgctgggattacaggcgtgaaccaccgtgcccggccaaaaaagcttttgaaaacttcgtcgtataatattatggccatccttccaaacgtgacctttttatgttgtattttatctaactaatttgcccttgcccccaacttttatcttggaatttcttacgtattaatatactgtcagggtccctgcttggggcattgtccttgggcttgtcattagataactccaagttggcttgactccagaggagctgccttcacacgtgctgtgaaatgtactgttgttgaccagagaccatcgttatcattaagtccacaaacctgcttcctgtctcttaggctgttccagtcttctatcgaaaaacagtggtttaagtggcttctccgatagtgctggtgaattggaagcttctcgtcatcccccttggctggggcgaggcttacttcctggggccttggcagttttgatctaactgacttatgttacctttctgtattaatcaagcctttttattttccatacttctgatgctttgacatcttggggccttgctgaccctgaagagaccagcccccctagggttagccagttcctaggtagtgaatgagtacaatgctcatatgcaaaataaccaatccaaaggccacgcccctcactcatatgcaaaataaccaatccaaaggccaggccccttaccacctttattgggatttcatactccaggccaatattgccctaccttaatcaccctagggccagataccaggcaagagacagcccctacaccccagagcctgtcagaattactccagccagctagtcctaaacctgcttaccttgtgtgatttattccttcccaaggaaaccacaataaaggctctcctccatgttttcctaccattccctctgcctcaggaccaaccttggttcttctccgtgtggccccttggcatggtgcactacctcttcttggggactgtgagtaacagactttttcagtggcaattgtcttttaactgttggcctcaccgtacctgaatagcagtaaaccctacatcttaaaatactttgagattgtcacatacagtacccagaataggtgaggatgaaggcaatttactggatgcagagcggccccagtccattccttatgtccgaatgctaagacttgagaaaggtggagaggagcctgactatcaagagttgccttcttggatgaagtgggctgaagacacacgaaccccttccattaatacatctacatattttccaccattgtaattgtattaataattggagaaaataacaatgactgtcaacaacaatagcttaatccagtagagatgaggtccggaataggttctggcctacctcagttcatgttttttactttcaatgctgaagcacaagcaaatgcaaaagcttctcttgaatgttttgtaaattgtgggataattgaggtatgtgacatggttaataacccagtgtctgctcattgagcactgggttattaaccatacatagcaaatggagcacatcatcgtgggttgcttgcgtcactagatcctgttgcaaaaccaagattcaactttaaaatacattttaatttaagttactctttctggcatgaatgatacatcactttggagcaacacttaccaggcagtgaaagctttttttaatgccctgtgtagcactgctttcggtgcccttatatgatttggatggatggatggatggatggatatagccacagggtcttgctctgttgcccaggctggagtgcagtggcaccatcatagctcactgcaacctcaaactcctgggcttaagcgatcctcaacctcctgagtagctgggactactacaggtatgtgccactatgcccagctaatttttaaattttttgtagagatgggggtctcaccgtgttgccggggttagtctcagacttctggcctcaagtgatcctcccaccttggccttccaaagtgctgggattacacgtgtgagccactgtgcccagcctgtttatatggttttaaaaacaaaaatgtatatgctctcaagatggctttcagagagcttattagtgtcttggccatttggaattccatttcacttaaattagaagagtgaaagagaaatgaatggaagaccaaaaatggggagaagaaattgtatctgatataagcgtggctctacctgggagaatggccattccgaattactggaaacaggaagaagacttgctatgatgcttccttatatctgtgggggaaaatcaaacttacattctgaaaggaaacttaatacttcatgtttttaaacacaaaaggatattttttcagagtagcagttataaagttgttagtttaatcttttagttcagctttttttcttaccagaaaaataattagtagtacaaaaatttatgcgtttgttttagctctattctgatactgttaagaagatacatgacataaaaacaggaatattttcagtcagtgattacaatttaaaatcatattcgaaatttaataaaaagtttaaaagaaatcaccagcataagatgttgtcatttggctcttggggcaaaccagctctcttctggtgaaagaactttctggatgaggtcgaaaggcaacagaaaacctggggaacaatggctgtctttttaatgggagttgctcctattcctggtggtaacaacctcttcctgttgctcctttccgaatggaattgcctcagtgaagttgttgaagaagtgaggagggcgaaatatgcccatccttctacagtggggagaggcctggcgcatgaaagcaggcctttgtgtatgccgggctgggcccatgcaaacagggcacaatcaggctattgtttgtttgggaaaagctatggcatcctattgcaattatttatggaagaaaatatttgatgtttttggaagaggttaggtgtggggggtgatgagggagggaggaaagagactgggcttacctcttgtcccattcactccaaatctctcagtgcgtaggatagggtccatctggtccaaaggagagttttgtgtgactctgtgtgttggagtgttttcgaaatgcagagaaattcagagcttctctagctttggctagagaaggaacaatggaagtgagtcttattctacctaagtttgatgtggggcagcctgttctgtagttgccttccaagcccttcttctttctgatgctttcttggtaccattgcccacatgctgcctccaccctggatgaggtctagacctgttacattgattctcaactaattaaaagtcaatatggtaaaatatttgcagcattccttctccttccctgtgttcatttctgaagctcaacagtcttccatactcaagctgtggggaggtccctttctcctttgacaccagccattttgtgatctgccctttcaggccaccccagccaccctactttcccagtcttgcctctgcctacttcacctcttctctcgaacctcagaagcttctggagtcttcacagtggccctaatcatgggtctcatccttgttttcctgtctctttgaggttccagcagccagctttgcctcatcaggcctttctctgaaattcccatcaataactacaagatctgcccagtaccttgtgcatatcaggtctcaggaaattgtgagtttcttgtttcattaaacatttttctttccaggaatcatcattcatcgcattgccatatgtgtccagatcccccttttcagggagccagtaattcgaaagcacttgcctgtgttgaatatggtggaaaaaacaaatgtcaaccctagccggccatcactccccatcggcccaccccattctcttgtgccagtaggacttgcctgtgttttctttgggcagttcaaagttgggctcttgagaagttgcctgtaaattcaattgaagtgaccagatctcatccttacccactctgtagctgcagataataaacactggggacttcccttgtgcctgtgttttaatgtaaccttaagacttgatgctccctggagtgtaagaatatgaatagctactcgctgtggatattgcagttaattactccttcctgtcccatgtggtccccagaggaatatgagattgccacaaacatggcagctttctttggggaggtgggagagggagatgaatcttggggcaaggcacattctcataaccatgtggctccagaaagctgcctgactcagagaatggctataaatgcccggttgtatggatctgagatcctcaaagccaggttcattcacttatttattaatttaacaaacattaggcagctgtggtgctctgtctgctccagcagtgatcaagacagaaaagatttcttcaatgctgcgtgtggtggctcacacctgtaatcccagcactttgggaggccaagacaggcggatcacctgaggtcaggagttcaagaacagcctggccaacatggtgaaaccccgtctctactaaaaatacaaaattagctgggtgtggtggcccatgcttgtaatcccagctactcgggagtctgaagcaggagaatggcttgaacccgggaggcagaggttgcagtgagtggagatcatgccactgcactccagactgggcagcagagcgagaatctgtctcaaaaataataataataataataataataataataataatagtaagaatactggggtggggatggtaggatgcacagtaaagagaataataagctagtgatgagcatctaagaagaaaacacaaaacagtactgtcatcacaatgcaggagtgctgggttgggggccaggtgtggttgaggggtgctgtattacgctgggtagtcattgaggcctctgtgaaaaggtggcatttagactaagggagattggaaggtccagccatgggaagttcaggagaaaggataagaagaaaaagctgtcacatgggcacagactgatgaccagcaaggctggaacttggaagatgagggaaactgagagtgattgtcagctcaggctgctttgacaaattactgtagcctgggtggcttaaacaatagacattgcagcattccctctccctctctgtgttcatttctgaagttgaatagtcttccatactcaagctctggggagatccctttctcctttcacaccagacatttcgtgatttgccctttctgaccaccccagccctactttcccagtcttgcctctgcctacttcacctcttctctccagcgtcatggttggagaagcatattctcatggttctggatgctgaaagtccaaggtcaggtgtcaacaaggtctggttctagtgagggctctcttcctggtttgcaaacagctaccttctcactgtatcctcatatagtggtgggagagagcaagctgtggtgtctcttcactgattaaggacattaatccaattgtatcagggtctcacccttatgacctcatttgatcttaattgtctccttaacagccctaccttcaacagagtcacatgaggggttagggttcctacatatgaattggcagggtggaggtgggaggtggccggggatgagacacaattgatttcatagcgtcgagttataagatgggtcacagtattagatgggaccagagcagagagggtctgtaggccatggcaagagtgagaatttactcaatacacagtggaagttggggatgagtgagaagcacaagagtggcacactgatttctacaacagtcagtctagctgctgggtggagaaggggagaaggaggaatagtggaaaaagcagggagaccgcttaggaagctgctgggaccgtgcatatgagagatgttggtggcttgaaccagtgctgggtttctcagcattggcagtattgacattttgggtgaaataattagttggggagtggcagggcggggggtaggggtgcagtcctgaaccagtgccaggtttctcagcattggcactgttggcattttgggtgagataattagttgtggggggctgtcctgtgtattgcaaaatgttcagcagcttcactagtctctacctgctagatgccagaagcccacccaccccgccccctagtcatgacaatcaaaaatgtatctagacattgacagatgttaacctgggattagggggtggggagaccaaaattgtaccctgttgagaaccactggaccagagtcatagcaatttgtagtggatagatttaggaatatttgaagacttgtaaaatatagcctgaagggaatggagactgggagagtgaaagatacctctgagacattttggcttggacagaacagggggtggaggcttccattcctgagctgcaaaggagtggggagggaggagcagtgtagtttgggaagtgtgtggtggagaaggcagatggggcaggagctctgtcttgcatctctcaggtcagaaatgcctcagacatccagggggggcaagctaagatggagttgaacacagcagtgtagggctcaggggacaggccaggaatggagagaaacatttggcactcatctacttgtagcttccctgtcgagaaaaatgaaatcatccaggggttttcaaattcagtggtctctggaccccttcacactgttaaaaatggaaaaccctgccactgtctacatgtttatgttgccccagtaatctatgcattgaaacctaatcaccatgtgatgatattaggagctggggcctttaggaagggattaaatcgtgagggtgggggacctttatgaatgagattgtgcctttataaaagagagctgctttgcctcttctgctagaaggtgccctccgtgaaccagaaagtggagccctcacaagacactgaatctgccagtgccttgatcttggacttcccagactctagaactgtaaggaataagtttctgttgtttaaaagctacctagtttaaggtgttttgttataggtgcccagacaggctaggacaaacgccaataagctttcgtttatgtgggttgtatccattgatacttgctgtatgaagaattaaaattaataactttaaaaagatttattgattcagaaacagtaacaaaacttaatatgcgttaacgtacttttatgttggataaaaactatatcccaccccagtatatgaatagagtggcattgttttatgtgtttaatctctggcttaacagaaggcaattggatgatcatacctgcttctatgtttattctgctgccaatatcacacagcttctggaaacttccacggcacacattcatgagacaataagagttaaaaaggtaaacagtgtcttagtagtgtatgaaaatagtttaatctcatagaccccctgaaaaagctgcagaatccttacgcgttcacaaaccacactttgagaactaaagatcaaggagtacagttttctcatttttatgctgttcagagtgtggttgaagttcagccatcactagtccttcacggatagttcataccccaagttgatggccttgtggaattgctgatgctattttcatatatatatatatatataattctagcctttttctctggtcttataagagtcacatacgtaggtaatttcatatcctacaaatatgttctaaacagcagaatattccaggaaaccttaagtgataactgagttgaaagagtcatattttttaagcaatacaatttaaataatttttaaaggaaacatttctaaaggacgttttacattgcttgcattaaaaagaatataatgaacataatccaactttttctcaatactcagggtcatcactgtgaaagtaacttcattctatgataagataatgatgctcccaggtgggcaaggcagtttttcatctaaggtaattgagacaccttttaaaagcaaaagataaattcacagaccctcagtgtcattataaattacttggtataaagatacttaaatacctacagccttataaggcctaggtgtcaattttttacgcttgcagatcttttacaactgtaagttaaatgattttacacattaagtgcatataaaacaaaaagattcaaacccaaatattaatttaatgacatgggtaatattttgctaaaagtaaaccactgctcagaatgtgaataaactgacctcgaaggcctgagtacgtttgaattacggaacacctctctttgacatcacaattgaattttttctttaagtatcgcaaggccccagttcacggaagtaccacaacataaattggtcttcacttggtatgtgaacacatatttatatgttaaatgtgtcttttctttttggtgtacaacagctagagtaatgcagtttgcttgcaatgtgttttttatgtaaatgctgatgccgaatccacttggcagcactgagttacaagaaggttaagtagatgaactagaagatggataaacgaagatagataaaatgaagaaaaacaaaaatcaaggagaactcaggcgtccaagagtgtgtaaacaacttctggtgtgagacgcgctacattgcgctaaatggcctgtgcgcttctggtttttcccttcctctgttgattttttatagttgtcttttattttaaacacgcctcccccccccctttttaaactgattttaccatcactctctctagccctgcctccctagaattagctgcttcttacctcccttggatctggaacttaaatattaacgtgtatataagttaatagtaagtagaccgtgaatttagaagagtaaaacagaatcatgagtacgtagtcactgtggccccttttctgctggatttcaagttcgtaagcatttttggaagagagtcgaaggggaaggggtggcttgccagtcagttgagtgatgcgtgagggaggcgttaaatgtgcatgatgcactaaaatgcatgtttcgagatccagtatgactgctcttccatagatgatgaaaccaaggcagagaaataagatgtaactctcttaccttgattagtgatgagaatgggacagctttattcatgaaacccggaaaccactagcccattcttgggatgattgatatctgcaaggatcttcaggaatagagtacctggggctcaggagccaagactagaagtgttgaaaggtgagcaggaattagctgctggcctcagacgtggagagacacacgggtgtatgtgtgcacacacacacacaggcacatgtatattcatgatggcttcttaattcccactccaggccaactcatttccctttcccttccacaggtacttataccataaaaggtatatgaagtgctaaaatacttgtaggtatgttgtcaatatgagctactctgtaaatgataaataataattgactggtgagtctaggcaaggcaagtcaatgagattacaagaaaagagatgttaggccttcagaaagatggaaatttctctttgtccctgcagggactgttgcagagcattagagccaccctcaaacagttacccagtgagtctcctcaaagcaagtggcactgagatacaaccttcctacaggttttcaagtcatctcgtgtggtgcacagtcctcgccctacctcgaaggcccgggcgaagttttcctgagtgtgtatactcatctctttgtgttgtctctggcagggagcaagtgagtacaggattggagtaataggcatttttaggcttgagatggctttgtgtgtttggttaatgtcactacatttcctaggggataataaaagtctagcatgataaaagatctcgtcttacaaggtcccgatgtaaagtttggagcctaacttagaatttaaaataaaatacattttgacccattgtattgagagctggtataatttaatatagtgagcccctcggcttctggttggttgggttataaagcttcttattcattcgctcatccattaatgcatttctcctatgaggaagctttttcctttgagctgaacacacaaaattaatcgtgctcgaactctccaaattttgtgagttccctggtaactgactgtatggaagacagaaataaaaatcagaataaacttttattttctgaatcagaaagcagttgctccagcttttggtggtcacattgctaagatgtaaaaaacagaagttaggtgaaataaattaagaataattattttggagaaagagagggtagtgtttgactaaattagaaacattctctgagtcttagaagcgtgaatgatttaaatgaggttccagcatagtattgcatgtggtttctattttagagttttcccacttgaaaacaaactttgaggatttttattgaagtccatcagttttaacttactcaaagcttagcagccaccttttgcttttcttcccgttccccccacctcatgctgtgaagaaagtcatacaccattgtggtgttgattgaaacctttatttctccaggtctcctctcataaactgggctaagaaacacaaaggacatttgacacttcatgactacataagatgtgctgttcctctctctttctgtttgaaagtgacttggcagggtgaagttgagaaccccttggaaaggaggaagccgaaatgcaaacaaagttgaatcatgaagtgatgtcactctgaaccaattggagcagtggtgtcatgtgcctggcagctacttcaaatgcccacaaaacaggagtaatggtttaagctgtttccctcttcccctcccaccaccaatcagcagcagactgctagaggacagatgcaaaacagttattagaccaggcttagttagacatggaggatgcatcttaacaagttagtacctttttgcaaagcatgaagactaattcaaagtctattttctggttttgctctaccagtacggccaaaaccatttctttttaagtgagaagtggggatatggtcaggtttgattccagttgaagttgtgagctgcacagggctggtctgagcccagtggcatctttccaggtgtcagagccatgattttaagctcctgttaaattcacagtgcttagtaaccataacttcttggtttcatgatcataggggtttttgcatagctgccacccccattttctgtttgtgatccagtagttaaaactcccagaaaatatttctcaccctggtttaaataaacaaaacagccaccacaaaaacaaacaaaaacttggctaaccactattttcaggcatattctgagagagaaagagggggaaaaaaagactagacatcctaaaattaagcaacattatttttggaattgtgttgtttcttatactcagtcatttgtgaatgatgtggttcaaacaaaactgaaacaaaaatagtttttctcattaaaaatatgtttgtcgcatagccagcactcggaactagggagggtaacatggaagtattgtcattctcggggctgactggttgacagcagcctatacaggagtggagaatattgacagggctgcccgttctccccaggtcgaagagagcaaatgcacatccctgtgtgcacggccacctggttcctctcctcacttgctggtgagtattgaacggctcacataattaggcagaactcaggaactttcctccctatctctttcactcttctgaaatgccctttatgttttcctctgctctttcagtcccagtgccttttctctggtgcagcctcatggttcggtctcaccttcagcttttccttccctccaatacatcctgtaaattattgtcagacttcttcttatctaaataactcgtttaggtaaggtactcatatgttcaaaataccatggtggctccctgttctctgtgatgtgaagtcctaaccattagactcagctttcccccaggacaccttggcttatcttcttgctgctttccagaggcatgggccattaggctggttttctgaaggttctgccaaaaggctgggcccttgtctcccaccccactgctgttactcatgtgttctcccacttgctcggcattctttcccatgctttttccttgatcatcacttactagctaacatctattttttcctaaacactctgttgcagttgtagtctgcagtcactctcctaagacttgatcatctattacgctgtttcgttctttattttttaacttttcttcttcttttttttttttgaaacggattctcgctctgtcacccatgctggagtgtactggcacaatctcggctcactgcaacctctgccttccgggttcaagcgattctcctgcctcagcctccctagtagctgggattacaggcacgcgccatcacacctggctaatttttgtatttttagtagaatcggagtttcaccatgttggccaggaggtcaggtcgaactcctgacctcaagtgatccacctgccttgacctcccaaagtgctgggattacaggcatgagccaccatgcccggttgttttgttctttaattttacaaacttggcatagcttagaagaccatatacagtggcaccatatacagtggcaccatattagtggcaccatatacagttttccctgagaaaactggtacctcccaacagataccaaaatctgggaccaccccaacagataccaaaatccacagatgctcaagtcccttttataaaatggtgtgatatttgtgtatagcccatgctcatctttccgtatactttaaaccagggatccccaacccctgggccacagaccagtcccggtccatggcctgttaggaaccaggctgcacagcaggaggtgagtggcaggccaactagcattaactgcatgagctccgcctcctgtcagatcagcagaggtcctagattctcataggagtgagaaccctattgtgaactgaacatgcagggaatctcagtaatgcctgatgatctgaggtggaacagtttcatcccaaaaccatccctctcccccacccatctgtggaaaaattgtcttctacggaaccgatccctggtgccaaaaaggttggggaccactacgttagaccatctgtagattacttataacacctaatacaatgtaaatagttgttatcatgtattattagggaataatgacaaggagaaaagtccatacatgtttaatacacaagcatcctattttttttcctgaatatttttgatctgcagttggttgaatccatgggtgtggagccctcagatatggagggcatgctatactgatcacccctatgggtgtgaatgttgggcagatcctccagtgtcaccagccatgtggccttggtgacctttccatacttttcaatcagaatgatgatctccacctctcaggaaagttgtggggatgaaatggtatagtctgtgtgtgtagagttgttaggctggggcctgccatgttaaatgcccatgaagcaggtaattatggtagtagtggttgatatcttgaaatcagggggattcccaaatttctaccccaaatctggatgactgcatattgcgggagttcagtaaatatttgttgcactaatacttatgtgcatacgctgaaataatctaaatatttaaaaaccaaactaacggtaggactttcctcagggatttaacgtttgctgtagaagactgaatgatagaatatataagctgtatttttcttgtgattctacacattgtccatgttgcaacttaaatatttttggaatgcaatgtaaaagtgatttactgtcctataattgttttcctgaaagcaaaatgatatttaagtgaactgcaatgaaaaatgcaacgactgtaatttatcgttgaagggcattttcaaagtgtatagaatgactaaagcttaagtgtattaaatattctagaggaagacatatttaggctataaatctagacttcctttggaatttgtttcctttttctcagccaggtgtatgaagattttaagttcttaggcctcagtgggaagaagatttaaggttccaagagtacatttgtatctcttttaaattttctattgtttatcagtgacatatgtaaatgttttagggagctgtttactgtaacattacctactttagctctgtgcagttgtctggcaaccaatgtgataaagacagagggaagtgctgtattttgttgctgacaagtatatcttaaaagtgcaggtgcacctgaataggcaataaagtattaagagctgctcctggagcagtttgctctctgtgacgtgtgaaaagtctacggggtttataattggtctggccatacggctgcctaggattagactcttttcatatcccactaaacactctccttagaagcaagcacaaggagatagtttattttaaaatgtaattgctatgttactaagatttgaatttgagtaccgagaataaaccatatttctgtttagaggctggttggcttaaaattgtgtctaatccttcccctgccccccaactccgaatcagagaatgaataacaaataaacatgacaatgaagtctcatgctgttgttttcatatttgtatttaggagtttcagagcaaatgacttggaaaacaggcaaatccactgacataggcatttttagccaccttggaatccgaggagggattctgcactatgccctgtaacctcgttcacatgccgtttgaatgtataccatgaagaccccttagctcagggagctttgctctatttaagtaatgtttatattcttaatgaaccaaagaggaagtggtcatgggaaaagagccaggactagatttcattctaatgcttataaggagagttctaggaaaccctcagacttggtaaaccaaggcatttggagatactatgaattggtttaaaaggccatttaccacttcttttgtaattggccttttaaaccaactctcacttagctgattaaatgtggtcatttaaactgctagttaacaatcggaagtgcagtggcgcaatctcagctcactgcaacctctgccttccgggttcaagcgattctcctgcctcagcctcctgagtagctgggattacatgcgcacgccaccacacccggctaatttttgtatttttagtagagatggggtttcaccatgttggttaggctggtctcaaactcctgacgtcatgatccacctgcctcggcctcccaaagtgctgggattacaggcatgagccaccgcgcccggcctaagatttcttattgtggtattctgcagtggagaatgggagttggaaagaaatgttttctcccacacctgtcccgctcctgtctactgaaagctgattaatcagtcagatagtgagttcctattggtagtacgcctccaaaatttggaagaggggaggtggcgtgatgtgaaaaagcaaggctttagggagagattcccgctgggggcattcaccctctggtccagcgtgcctgttacagtgatcactccatagtggttttgcatgaacaagactgcccagtttgcttaggaagaaaacaaaggacataaggtagttctcatgtcttcccagcaccctaaatactcgggctaaacttccacagtcagaccgtcagcttcaggaagggctgctgttgggaactttttttttagtttgcagttagttcagctccagccaaaaacctacaaaaagccactgcaagccctctgcctgctcgtataagacaccttggttgggcccctgtgactgtccatccataggatggttggccattgactgcacagagaggtagggcaagataaaacgactcatttgtggatctgactccttgtacttctgtttggattcaaacagaggaagatagagtagtggccttgggaaaccgtggagagagaaaaggcatagtcagaatgttttcagaggagcgcagacttttcaaaacccctctcatcacgttcccactgaccttcagttccagtgctgtggccacagggtgtctgcaccccaacttctttgccaagaaattaatgatctgtgaagacacacagacatgaggcggacttactatttaaaggaatcctgaaacgaatatttttctgatacatatttatcctaatatatttgctgagcatggtttttttttttttttttttcctattttggagtttttgggttttttaagcctagggaatgcctaatatgtactgtggagtgcatttgttcatttatatcccagtgcattgtaaaatcgagcaattcagtgccttagaatcctttctgtgaacttgatgctacgtgaactacttgagaacaactactttcaagccctccgaagcactcagttacaactgtcggtctaattgcacattattctaattcattaaaaaagtccccaagggcttcttaggatactgctctatgttattagaagtccttccaaatagaaaaactttattaatttaaaaataaccgccaattcagacttcgattcaaacaaggcattttaccaagtccggctgaaagagcttcttaccacatctggcatgtagaatggcagaagactatttttgctagattccttgttgctgcagccgtttctgatgtccttttccccttcacacctttcgtgttacacatgtctgagatgacatgatgctaagtaaccaaagtactgctgcgatggaattgctctgatgtttttttccagagtgaaagctgctattactttaaaaaaaaaaaaacttgaggtttggtttctttccccctctatccgggtgttatacaaatatgtaattaagatgtttgggggttcagatgacaaacaaggagtctacttctaagaatgcatttgcaagccaaaagagtggtgaaccacttcagagtgcgggtctgtgggggatgatgtctgctttgcttcgttttgtggaataatttttaacatttctatttagcattcatgatactctaaatagaagcaggagaacactgtggctctcggatccaggagaggcaggccacgagggctcctgctgtttggggacagtctgtaactctaaatctttttatatgcagcaattatgaccttaaaaatgggtgactctaatactggcattcattgcctaaaaataattttaatgtgcaaatgccagagaccaggtcatctcagaaatggactagaattgaccactgctatgttttggtgaaacctgataaccttgcttttctccgtgtaccttgtttttcattgtaaaactatttaattatgaaaatgagagtgtgaaaggcaaagtatgattgaatttagggggcagttccatatagttgtaacaaactgattatcaaatgtccaccattagtatgttaaaatacggttttctaatactgagacaacagggatggagcagcctatccactgaagtcttgttgtttgtccctgctgtgtcccaacctggaatctctttcttcttccttcagcagacccttcgagatcagcttaagcttcactgccttagagaaactttcctgtctacctggactgtcttctagatttctagagcagtgttcctgcccttttcctttctaaatggggtgggagttctcagagaactcatctcctttatggctttatccatcacagccacacagataggttctgtctggaccatccttttccctgagctttcttctcctttgccatgtgttttcatttctgccagacactggcactggggaagcctcccatcgtctcagactcagggtgtgtgaaaaacaaacctgctttctggactctacagtttgtgcactagcctaagccgaaaatcttgaaatctgtcatcagtgactattgtagtccataggaatacccaagactgggtaatttataaagaaaagagggttagcttttttttttccggctcatggttcttcaggctgttcaagcatggttccaacatctgatcatcatctttttttttttttttttagatggagtctcattctgtcacccaggctggagtacagtggcgccatcttggctcactgcaacctcccacttctgggttcaagcaattctcctgcgtcagcctcccaagtagctaggattacaggtgtgcgccaccacacccagctaatttttgtatttttagtaaagatggggttttgccatgttggccaggctgatcttgaactcctgacctcaggtgatccccccaccctggcttcccaaagtgctgggattacaggtgtgaaccaccacgcccggccaggatctgatcattttctaggaggcctcagggagcttttattcatggcagaaggtgaagggggagcagttgtatcatggcaagaagagaaagagagacgccagatctcctggtagataactaacagagtgagaactcactctttactgtggggagggcaccaagcccttcataagggatccaccccatgacccaaacacctcccaccaggccccacctccaacaatgggaatcacatttcaacatgagatttggagggaacaaacattcaaactatatctacgaccaaattttcctaattcctttctacttaaatgctttcttttccatttatttcacccacatctgaccctaggatttcaacgtgttctaaaatgaatttcttgcacccattttcactttctctccaccagaatccatctcaccacccacctgccagtggcatactccttgcatagaccctgctctagcatgaatatagcccactgttatctgttgtagaacctcacgcccagcttcccaccctgtgtgacatcttcaccctcttgccctggcttgtgccatccacattccgatcttgatgactctggttctcttctctttgacggtggagggttgatcccttccttccccatgatcataaaaggtcatgccaacactcctaaaacaaaagatagattaataagagaaaaacctaacaaatttattatatgtgtgcatgggagtcatacaaaatatgaaaactcaagaaaatggccagatggttgatccttaaatgctttatttattggtgagaaggtattgggggtgtaggagtaaatgattttcagggaaaatgaatatttccctgagacagcaatttacttgtaaatgatgctctttagaatttgaacacgctccagaggcagaaattgtcttgtgaaaaagtctgtctgggtatggttgcattcctcagtcttgagctggtggatggcagggtgcaattgcaggccgtagtgttcctctttggggatctggtttctaggtgggtaagggaacttcagagaacagccttgtcctgtgctttgcgagagacaaaggatgaggaaggggggtcagggaccttgaggctgcttcagcatgtcaagagtgccatgtttgggacgcctcaacactggaaatagccttcattcctctgcttcttgggtctggatccttttctttagactccaagaaattcttccttttgccccaaactcacattgtttttgtcttctgtccctctacttctatgtaattctattattatgcacagattctgtgtgcccaaggagactgtaaactccaggagggcaggaattatgtcttaaaacactagcggttaaacagttaagaggtgtcttaaaacattcctgtagccccagctacactcttgggtgcaggaatcacaagtgccttattccccacagggtccccagcatattccaggagctcattatgtttttaaatgaatgacctactgaaggcaagagaccaggaaggaaagtttgtaaaagtttacattattagattacccctgagatgtgtaaccttctcacgagttagatttcttgaaccactgcccgggtattgtattcctactctaggagcttgaaggattaatgataatccttttacagatatattcacaagtttctgtgaatgtgaattaagtatgtagatcttgattgcctttcttgagtgcatggtttttttctagaaaaacaaatttaagttaggtgggacacctaataaagctctaggctcctttcttttcctcttttaagacacagttaattaccttatgctaagttggaatataggaattatcttccaaaactgtgtttgcttgctgtgtctacataaaaattgatacaaggtatgccatggtttatacaatttctggcacatttacctggtctctgttacaggtttgtgaaaccaatttttttattgtaaatagtacgttaccagcttaattgctttagaacctagacagtctatgtctgtgatagtaattacattctttcatgactttgtttggtaacctgaatgttgaactagctctacagatttaggtcatgtctgatgctagccattcctaggaaaaagtggtgaggactacattatgggcctttccccctagacttaaaactgtgaagaagtcattttgggttgaggtatcccctggtaccctctcctgaacttcaatagaataacatgatgtggtgaatgaaccatattagaaaaaccagccaatcagccaagattcttgtattgactcttctgatctccctctacctctcctttccccatctgccaaacaaagggtttggaacagttaaattctaaagtggtgtcattgatggctctcagtattctgtggactttcctggttgattcagtacttgtgattgacctggaccccctggtttggtccagccttagagcgggtttgcaggtagacaccttcctaatgtttgttccacgtaagcccccggagcacagtatttccatcagctattttgtggaagtgagcgattctcttttggttgtaaaccttcactatttcatgtgggtgacttgacaatggctccatttttgaatggcccattgatagttgtagtctaaaaatttccagagattacacaagggtttatttaaagggaatgggaatagggagaaggtataacctttccaaaacaatctttaaggcaattataagctgttaggaaatgtcatgtaataataacacagatacccaagcttatatcacataaatcattcattttgcatgtttttgacagggagatttattttccaggttaaaaacaaaaaagaaaaatcttaaaagcttaagcttttattgtttgctttttttattaaaaagtaatttggagccagtaacttaacctgtttttcataaacatgctatctagaggcagccaaaaaaatattcatgcttgcatagtcagggtcctcaaatgaacttatgtgttggatcatgataactctggtaattactcgaattacccttgttgagtaatagtatggaccctgaatacaagggtttgatttatgtggccagctctgtgctgctgggtttatgaggacttgccagatgtcatctcctaattaaaatccttctttacccttaatatcctctcctctgtccccaagaaattaatccattctattgctggagcatgtaacagctgatgttgaagttacaagtttacagcttgaactttgcctagactgtaccttttttgggaaagagtttgcaaagcttttaagcctgactcttgtctttagatcaccagcatcaccatggtgcctggcatcagtggagcctcagcaagtgtttatggtggaaacctcagaagctgtcactttctctggctgtaacagttgtcatctttgtttacagggaaaatgctcttgagaaaatggaggtcattaaacactccagcttcagcaatatcatcagagctttccgtcacgtgagttatctcaccaaagggtcagattctggtaaaaactcttgccttcacacttacttctgttttattttgccttatttgacatttcaccagaattgatccataggttcaataaggctccattctgttgggacaaatcaagctagaaagacactgaactctgggggttaccagaaatatctgaaagcaaagcagtgactgtgaggtgggaatctctctgagaatcctttgcagaaccatgtaacagctctgcatcactagacgagccaagcgaagtggtcctggatggttcagtaggctcaagcattgagggtccagagcatcctttgcccctggacatggaagggttttcattgggagatggcatttagggcatccttataaacgagcaggagtaaacctagcaataaaaaccaaacctctgccttcagaggtatatgctattacttctgcttaaaccgttgtcagagctaacagttttggttagggatttttgtgggtccagggcacgcccagacacccagatgcttctctatgtttgtaagatggcgagtgttgagatgtcttataggcttatattgagtgaaaaggaataggatcctttgtcagtagtaacttaggctttttaggtggccagggcaagagaacaccccccctacacacacacacacacacacacacacacacccctacacccacacacacccacccctacacccacacacacccacccctacacccacacaccttcccacacaaacctacacccacacaccttcccacacagacctacacccacacaccaggatttgaaggctctgctaagaggctacaacaactgtagcatacaactagcacacttgttgctattatgtgtaggggactagatggaaagagtgcagataggactacctaccattcacccctaccagcgaagtggaagcactcatcttctttcccttcttaccctttcaaagcaagttgttgagggatgaagaggagagtgactttaatcgtggctttaagtagagattttctttaggagtaattgtttctctcgacagagtggataggcttccatagttgtcttaataccttttgtccaccccaaggattgacccaggcaaggaggatgaaccctcctcaatttgggaaagttaaattttaggcacagcaggtcaaagagtagggaagagctgcagttgttggaaccaagtgacattgatttagtctggaaaggagtcacagaggaatcaaaagccagaccctcctggcagctttagatgtggttggggtctgggaataatgctggtcccaaaatcacctctggaactaactcctgtaaaatgaagcctctgcatccttcagtaacttacttaaaattttgttagggctgcattttcttcaaagccaagttctgaataagaagtatttgttttgggctctagccagattactgaagtattgttgagggagatttgctgtggaaggtgttgggggtacagggattgtgaagataatgtaaaatatttaacattttaaaaattttcagtaagttctctttccccaatgtcagcatgacttcttcattcatgttcttccatcactctccattcagttagaatctcaattgtgtaatatcagtggtagcgacaattatgaaattcgtccagtgaggaaaatccgcagagctagagcccaaaccagcaactttgtagtgaggatgaccccactggccggggagaaactgaactgatttttttttttctctctctctcagctttttattttgaaataattttagacttacaaaaaagttgaaaaagcatccaggcatggtggcttatacctataatcccagtgctctgggaaaccaagacaaatctcttaaagccaggagtttgagaccaagctgtgagactatctctacaaaaaaaaagaaattaagtagccagcagtggtggcacgtggctgtagtctcagctacttgggaggctgaggtgggaggatcgcatgagccaggagttccaggctgcagtgaactatgatcatgccactgcacaacagtcttggagacagattaagaccctgtctctttaaaaaaaaaaaaaaaaaaagtttgtaaaatatcacccagttttccctaacgttagcattttacataatctatacaccaattctcacagccaagaaattaacaatgacacaatactgttaaccatggactatttgaatttcaccagttttcccactaatatcctttttcagtcccaacatccttcattgtgtttacttactatatctagtcttctccagtctgtaaaaatgtgtctatctttgcttgtttttcatgaccttgatatttttgaatagtatggacaggttgttgcatagaatgctccaaattggttctaatgtttctcatcattaaactcatttttatacattttggggaagactactacaagattgacattgcatctcagtgcgtcacatctgtgtgatgtcagcatcttaccactgatgatctcttagccttgaacacttgattgaggtggtgcctgccaggtttctccagtgtaaattttctgcttttcgcattgttactgatatcttagggctgatactcacagtatgcagatgtctcgtttctcttttttcatatttcttttcttttttctttttttgagacagtcttgctctgttgcccaggcaggggagtgcagcctcagacttctgggtttgagcaatcctcccatctcagtttcccaagtagctagtgtgcaccatcactaattagtgccccaccagttttgtttgtttgtttttttgtttgggcagaatctcgctcagtcgccagactggagtgcagtggcgcaatctcggctcactgcaacctccaactccctggttcaagcagttctcctgcctcagcctcctcccaagtagctgggattacaggcaggcaccaccacacccagctaatttttgtatttttagtagagacggggtttcacatgttggccaggttggtcttgatctcctgaccgcccacctcggcctcccagagtgctgggattacaggcatgagctaccatgcctggccttcaccaatttttaaattttttgtagaaactcactatgttgcccagtctggtctcgaactcctggcctcccacctcagcctcccaaccacaactggccaaggtcctgtttctcatcacattgtcactcactgatcttgtcatgctttggtggagcttatctacaataattattactgccatgctttaatggcaattttctatcttattgtcatttattcattggaatttttacataggaaagacctgctccttctcaaactctaaacagtttcattcaccatacttttctccaggtaactttctgggtggctgaaagtgactttcaaagaatggagatatcttttcaatgttgagagagtggcagtctgctggttcccaagatgccttcttcacctagcattgagactctgcagaatgccttgaccacagttgtgatttggatctgttggcttgcaaagcccatttgagaatttacaaaatcattttcacggcctgagagtcttttaggtactgatttttttcatcccttctttactaacagactttatttagtagagtattattggacaggtttggggttcacctttatgagaaaaaacttagattttctaatttcagcttttttattttcttccatcagtgggacaaagttgacatcattgcctaaaagtaatttctgtgattatctgtgtatttcagttaaccatgttctttggactcactgtggtcttcagcagggatggtggccaaactatgtttagaaagataaaaattaaaatgacatctgcatccttcatgtaaacccataaaaaatagcacgtgaccctgaagatcctctgcctctcattccaggcattacaattgaaaatgctatctgggatgttaaaaactaaaactattctaggacttagtggaatattgatagttagggaatgctgtttgctttcttgaattttgaacctgttattgagaaggtagatgcgcctgtttaccccaggaaggctcctctttgaagacagtgcccctggagcacatgaccttttcatgcccttgcctgtcaagacttttccagtactctaaggtcaaagggcgttgggccaggctgatctaatcagggtattaaccttgccccactcatcttgatttattcctagatcccagttcccagagcatccctttagagcctcagaaatggaacacaagacagctgaaataagcccgtggccaaaaggcactctgagcatgagggaagtaagcaggcttccctgtcactgctgaggctctgtcatccagccccagctgtcctcttgtgatcactcagcagacccgggaaaaattcaagaatttgttttttagtgtcagtgggagacgtggggatcctgcttttgctgggagagcttcagttgtctgagtccccactcaaccccaggctcctgccaaggccaccaagggcaggagcactggaaggctgactatggagtgaagaggccactgggtttcacaaacagcactgtcagccaaagctgtagcttgttagccatccaaaagaatcttgcacctgctgccagtgagcttacacctagatgacagctggagctgacactcattcagcccttactctatgccaggtactattctaaacacttgccatatactcagttgtcccacagatacaactatttatccccactttagagacaaaaaattgaggcacagaaaggttaagtaatttggccaaggaagtgcagctagtaaatggcagacctggggtttgaaccgaaatcagtgtgactctagagtacctactcttagaccctactctctactgcctctcattagaagtctcccccacctccctaccaccaccatcaccacccaccctcccagccacatatatgctcacactgggtggttcagatggctagaagtggcagctcaaccttgtgtgcctcggacacgaaaatattaggttcagacaccactcagacttcacattttcattagttttgggtagaggaatgagaataaatattcagcgagacagccttttctaactgcaagattgcattcctcttctttctagatgcagtggcaagaacagtaccctggatggtggagctggtagtggtagatgagatagagcagtcccttgattctgctttgtccccattaatgacagatctgagggcatccagaaggaatctccacaagcccagcctccacagtggctgcttcctctacatggtagagtggtgctcacctccactcctccatagatgccaagtcatctgtggtatagatgtggatgtctttgttcaaatggtccttgagtctttgctcagatgatccttggttcttcatttcacctgggaaagaaaataatttgcctgttgtcattttatccataatattaagaaaacttaatggcacaatctaagctttttaccatgttatttatcatgggattacttttttcaggtgtcttctgaacacgcagttgtcccaccaaactttgacactgcccttgtgattaatttttgcctacattaatcactctcccttgttttaattgcacattacattcttttctgtccttcccggacatctttgctagcacagtgagtgcagggaggactgtcacggactctctcccctcttgaatgggggcattccagcagagtgtgttacatgagctcagagcacatgatgtgagagcctcgtgatgaaagatactgcaaaaacagtgcgcactgttatcaaacctgactgccttcacatcttgctttctgtggtgcaaaataaggtttttatagtgtcctgtttcttctgttatcatctaaaccaatggggaacggtgagtaagtagtaatcttcagaaaagaagaaaagacagggaggagaaagtgtactggaggcctgctttaccattaagttgttaagatggagtctcactctgtcaccccggctggagcgcagtagtgcagtcgtggctcactgcaacctccaactcctgggttcatgcagtcctcctgcctcagcctcccaagtggctggggactacaggtgtatgccaccacaactggctaattatttatagagatggggtctcattttgttgtccaggcggggtttttgttttttgttttgttttttttttttttttgaggtggagtcttgctctgtcaccgaggttggagtgcagtggtgcaatctcagctcactgcagcctctccctcccaggttccagcaattctcctgcctcaacctcccgagtagactagctgggattacagctgcgtgccaccacgcctggctaacttttgtatttttagtagagacggggtttcaccatgttggccaggctggtctcaaactcctgacctcaggtgatccgcccgcctcggcctcccaaagtgctgggattacaggcgtgagacactgcgcctggccgtccaggctggtcttgacttcctttcgcttgtagcctcccgaagtgctggaattacaggcgtgagccaccgcatctggtctctaagttttttttgaaagtgtgtgtgtatgtgttgaaaaacaatcttactgccatcatattgaagttacctagtgcatttcttcttcagggtacgaagaaaaaagaaaagtatgtcctgtggttgatagaaatcagtaaaatggagccctgtacgaggaagtgctgatgagactccaactaactccatggagatgagctacaaaaaaaaatactgattgggttcaaatccttggcctgccatttactggctgtgcttccttggtcaaattacttaacctctctatgcctcaatgttctcatctctaaagtatggaaaataattgcatctgtgtgaaaactgagttactatacgtaaagtttttagaatagtacctgacatacagtaagtgctgaataagtatcagctagagagagagagagttagtttccagcagcctgtttctgtttggggtcacatgtggtctctgtccacctggctttttaggcctctcttacctgttccctgtttatccttgcctgccccagggaggagtttgagttggtacatcctgactgggtactctgcctgtggttagcaaatactctgcatgttgagtgctttcaaaatacagaaacaaacaacttgtggaggcattggaaaagtgtgtttgagaaacaagcagcctcaccatgaatgggagtttgtttccctttctcgtctttctggtcatctgctgcacgggcaggaggagctgtgggttgcttttcttccttggaacatggagcaccactctcccctgtgctgatacacttacaaagaagttcacctactccttggaaagttctggaaaaggggcttctacactgttggcctctcgaggagaacggtttttgtttctgtcttcctggaaaagaggtgactgctggcatcatctttctagataaactccttgctatgatgccattagaagcagtgttcttttgtgttttgcttttgtttttccctgtagacaggaataacattttgactagaaacttccctgatgtaataacgaagatggcctccttagaaagttccagaacagaccccttcacctctgtccccagaagcagaagtaggtgatgcactttcttggcaagccacataactaccatttctctacaatcgaagctcaaaaatctgtgcttgtatacgttcattttttgtttttacttctttacttcctttgataagacagaaacttctgtattaaaactgatttaactctgaggggctaagtgaacaacaatctgttgtcctatagaggtcaaggcagtgctcacaacaggatcattgtgctgctgtagttcagtttaggggacggggaatgtttataaaaacaaagttttgaaatgaggacagggaaaggctttgtttacctggggctctagacttaaggtactcattttgcctgcagaataatgaaatgcagagttgtaattagaaaaggttgatgtaattgatgtgttaacaatttttgaggtttttctctttccactttaggacagtcatgcaattatttttctgaaccaaaatcagaaccatcagtcgaaggctaaaacaggcctggggaaacactgtcttttggcaaagaaagacaaagatccttgttctctaggccagtgtgcatatgtgtgtaatgctttaaagaacaattttgacaagaactcttaggatgcaacttgtagagtgatttttaaggagatgcagtaggatttgtgcaagtattctgctatgagcctaagattttcaacatggaaatctagccatgcagtgactcgttcactttggcagtgtctatcttagtctgggggtgagcgtttgtagaaaatatttagagactcaagtacactcatttgaatttttgctgttagcaaataaatggcaatatgtgtaacgtggtgaatgggatgtaaagctgtctttatattaccacggttagaatttaattttgaaagttgcaagtcaaactgcttcctcttgcgtcattaagttgtgcctcttgtttgctcaccggcatgtgtgtccttgtgtcattttggttgctgtgaaattgctcttaccattctttcatccttcaacctgctgtgctacaatcctaacatgctgtttttgttgaaaatgcattcactctttttggcatcttttttccccagaaagttagaatattgggaattcattggtattagtgaaattcccacctaatgcagcagtttttttctcttacctgcataatagacgcagaacaaattaactctaaacggattagagctgtcaactgacagatactgtgcgagatactgaggaagcctcagagatgataccaataaacaggacagggccttctggtcgtgtttctacttctcttattggtttgtcttagcaattttgaattgcactgaaaacgaaatttcataggtacacgatacagtagttagttttaaaagtttttaaaatattaaaaaattgaaagtatttaaaatatttttaaaatattttaaaatctgctgtgtgagatagataggagacctagcttttcttccttcttaccttgatccatagagaaagcaaccctgaaagaagaaaaactcacccatttgagctttcttttgtttccactgagcaatacggaagaaattcaccgctggttataggtcttcagtgctttcttcagagtgggattgttttttgtttcaccataagtagtagtctattaaattaacagttgctagagaagaagctgcatctatatatgcagttctcttcttgtcaagcagtatattttcacgatagcaatgaaaaaattccatcctcaccagccgctgaaacatagtaatactgcagaaattcctgtgaactatgcgtttgctgcttccttttgtttgtttgttttcagagcagatgggcttgtttgctttttgcttaaacattaatcaaaaatcaatttatggctatgtaagtggcattagataattctcattctgactacagtaaataatatctatttgttcatgttagataagtctgggcggcagtggaatgtaaaatagaattacatgagatatgacatatggctatgtgttttataaattaatgcttttatgcatgtgggaggagaagtaatttagcttactgacaaaaagaaaagcaaaggaaattccagagaaagaacaggataccaagtctaaataaatttggaagacaaagagaatatcatagtttagttcaatcttttaaacaaattgtcacaatttatacgttgggataagagaaccatgagaaaaggtatattctaagtcctgaacatctttctataccctgaagatgtttttatagctcttctgctgactccctgccaaaaaaactatttacggtttggggtagggggcgtgtcatgccatacagctaaatacacttttttcctaatctaggaggcatgtctacttacaaataaattgcttaaactagttaggcttgtgtaaatgtaactgacatttccttgagatcagaaaaagttttgctgattaactatatttgtgtgtgtgtgtgtgtgtgtgtatttagagagaaggagggattttataattattacaatttgatttgaaatgtctagagaaagtgagagattatggaaattaccataaatgctccctttttcatagatttagatctgttaattgcaagaaatctttttttaagtgaatcaatgggaactttttatttcttccctaagattcatttagccttgaaaaggccaaaagttgaatgaagcttctaaatgccaatctttccctccttctgttaaagagtatgcttcaactataattacatttgcattgtttaaaatattagtaattctacagccagacctctgagatagctgagaaaccaaaaagtgaagttcaaagacatcatcaggcaccctctccacacacaacataccaggcccaccaaggagtttacatgagtgtttttgccttgttagccgtggaacgacctgggcagtacccaaaacttagcaaactcttcttgtaccttgtattcagtagacggtcagtagcaccgagagtagggagaagagtaaatatgtttctaatactttattcaatgtatgttgttaacagtgtagacactctgactttccttgtgaattgcgcctcagtatttagttttcatttaccctggatcagatagggcatgataacctttgaggggctttgtgcatatgtaatttggaatctgagtcagtcgggctgtgtctctcccaacttcccttctcatattcttctctctcctcctcctcccctccctcctcctcgcctccctcctcctccccctccctcttcctcccctccctcctcctcctcccctccttccttctcctgccccctcctcctccctcctcctccttccttctcctcctccctcctcctccttcctcctccccctccttcctcctcctccccctcctctctcctcttctctcgtttctcttctctctcttctttctctcttctctctctaccattgctgtcagttgagatgggcctgtgcggcactttgtttgcagttgattggcaatcttctgttctactactgcatctgaatcatcacttgcttccaccagttctctgaatgtcttacctagtgatcctggtggggaaattacagtgattagtgttccaattcttgtttgcccataagtgtttcaaagtagtatttttaaaaactcttctaagacattctctcttctcatagtagatgcagtgaatcttaaaggtgccctaactaaaatttttgtgctataaaattggcagctttacaaaataaaaggttcgagatatgagcctgatcaaggctctgcatttgcaacaatatccttggtttgcctggccctgttatattttgctgttgtgatatgactcctgccagtgctatttccatttaacctttgtttttctaaaagacagtaataatttttcatttctagggagtctctgacatcagctaaaggaaagacacttttctttgactgtatatacatttctccccatttcattaatatcaaagttgctctttcaaatggcttataaaattttaaaattacaccagttgcataagcctgcataaaaagcagactcctacataagctgacaatgcatttgtaccgtggtgttgagcagttttaacatcctccgtgcctctgtgcttctgctagctactgctctgataaagttatcaaggtatcattggatgcattgaccaggatgaagacacaacagtatggccttattaaatttggaaataatgaacagacgagtagagaatttaggagcaatataggcaagcttaataggtctttactttggggcctgtaactccaactacatatggaagaatttaagtacaggaaaagttaagctcttttcccagtagttctgctgacaagttgggtgacttcgggatggttacctcttcatgataccacacggtgatggtaacagaggcactgtccagtctctggttcatgcacactggtcttctcaggggtccctgtataggtgacacagtggagaacagggcagtactgccagactcagggacccagttcatcgagaggggcagtgtttctcttatgctgccttaaaggcattggatgccttttggaaagccagtggacaactcctgcatccacccaagattaatgttaacagcttaaagaatcattgcaatcaagggaaattttgcaacactttgttgggatatttttaaataaatgtgtgaacaccttgttttaggcttgctgaaaatgacccaggaattccttgacccgggaatatagtgtatggctgccaattattatattccttcatcagacaaaggcggaacagttcactctttttcttttttttggacacaaattctcactccctcacccaggtcagagtgcagtagcatgatctcggctcactgcaacctctacctcctgggttcaagtgattctcatccctcagtttcccaagtagctgggatttcaggcacgtaccaccatgcctggctattatttgcatttttagtaaagacagggttttaccatgttggctaggctggtctcgaactcctgacctcaagtgatccttctgccttggactcccaaagtgctgggattaaggtatgagccaccttgcccggctaccggacagtccactctttacaggggggcgtcttggtataagtatggaaagctccgtagatgccgtgtcagtccataccctcaccaccttcttgaccctgtgccgataaactaagagatgtgggcagtgtaccatctggaaaggaaaaggctttggagccaggtagtcctgcctgcatttgaatctgctttctaccacttacttacatcaggttttccttgtctataaaatggaagtccttgtacccaccacctagaatggaagtgaggattaatccagaccaacgatgaagagtccagcatgcaggaaatgctcgtttataaccatggaagtttcgaggacttttgaaattcgatgacattaacctttgaggtgcattttagttggcttgtgtgatgaggcctttctacttctagttccagaatcgtctggatctacattatgtgggaatgtttattcccccctttactttcccaaaatttgctaaacattttcattgctatttgagttttttaggagacatactgagatgaagttagggatgtgaaaggtttactgaggataacaccaatgaaaggaagagaggaggaagatgatgggtgtggggagcggtttgaccaggactctgataggacagacactctgccagccctccgggagctcatttgcagagccccctgttagatggatataaccgggccctgggaccattgctgggctcagttactggccaggagctgcctaggaagagtgtgacctaggccaaaagttgaagtggaccctagaagagctagcagctggagggcatctgctagtgacactctggagctggacagcaagtcctttctgaaagaggatctgagctgagtatccctgtggtccagtatttcaagttggaacctctaggtttgaaaaatacatgttttgggtgagagtttgattattcttaaagggacatatctttcaaacatatggctgtggaagaggaaacttgtttttgacttgtaaaataccagcagagccttgcagtgatcacaacttatgtgaaatacagaccatcacccacagtttacgtgttcacactaaagtgccagtctctctatgggttttagagctgatttagatacatgcattgctaatacagtcagcccagccaagatagtgccatcctccgcaagcatccactaaggcatggagtcagcttccgtcattgttagatcagtacttgtttctttcccttgcttatttttcctaacctctctgaacctgctgtgttggaagcttaaggaacatcatcctctgttgggcagaattcttccatggccaccccagcattatgccccacaccatttgacttactcatttgtgaatgccaactcagaatgtattgctttgattcttgattaggatctcaacctctatttattgttaagactatcaccctttgattcccccccatcccattgtgtccttctaaaggcacagaatagaacatcttctgccagaaataacatacaaatttatcatcatacaactgtacaatatgcaaataacttgctagatgatattactgaagattctacatccaattaaaataaaaagagaaaacaccttaagataaccatactattaaaagatacagaagacaactggaataaatggaaagacataccacatttattagacaggaataatcatcattagcaagatggcaagatgtcagttctccgtaagtttttcaatttaatataaatccaaatacaacagatttttttcttttagttagattctgaggttatcattaaaacaaaaacaaacaaacaaaaaactgaacaagagcaaggagtccttaccaggtattaaaaacttccatagtgcctaaataattaaaatagtgagataccaatagatgaagagacagaccaatggaacagaatagaaagtccaaatgtagatgcaagtacctgtggaaatttagttattcgataaaggtagcttcacaaatcattgggactaagataaactcttgatttactggattggggcatgtaaattatggcccaatcatgccatgtttcttttctctggaaaagaaagtaaattaggttcatacattataccatgtaccaggctagactccaagtgaatccaaggtaaaagtgtaaacaaaactatgaaagtcctggaagaacacatagcgagttcctttttataaccttggagcagagaaagcctttctagtttcaactcaaaatccagaagccagaaaagaaaacattcataaaaattgaatttaaattacaaaaaaactttctgcatggccaaaaaccataagcaaagacagatgccaaactgagaaaaatatctgaaacttctatcacaaagagctaatctcccttgtttaaaaaaacaaagtaaaacagagctcctagaaattgttaaggaagaggctaacagttcaataggatttgggatgaagtattgaacagatagctcacagaagaagaaacacaaatagctaagcatagaaaaaaagtttgatttcactcatacgagaaatgcaaattaaaactacaccaagataccattttttcacttctcatattggaaaaaatccaaaatatttgataacacactctttggaaaacaaccccacatggctgggaggacggcagaatagcacatctatagaggagaatttggcaatatctctcaggttataaacacgtattctttgacccaccaatcttagagggggcatttaccccatagacttgcacacatgtgaaatgacagttgtgcagttgttcattgtagtgtttcaaatggcaaaagatgaaaatgtcccccaaattccatcactgagggaataagtaagttagggtgatagctcccaagcttattttctcttcagaatcacctcatgaagaaaatgaaggtctgtgtgatagtagctggcaggtgggcatggtggtgagggtggtgtttgagcggagacctgaatgaaggttgagaaggagccagccactcacagacacagaggaggccttcaggctgagagagcagagaaggaccctgtggcagagacaagctggaaacagcactgcttccatggtctggagactggaatatgtgggttctgcagacacctggggggggcaccacctggtaaatctgcctttcagctcttggttcttccagcaaaccatgccagctgtggctctgtagccatgtcctcggaagatggcagaggttgcaacgaggcctctctgaggtgctctgggagcacagaggagtcaggtggaacttgtggcatgttgccaagggaagaagtgatttttagacagaataggaatttgccaagaagagaagtcagaaaagcataactggcagaggaagcagcatacgttacaagtaactgcatgtgtacagggaatcactgagtgatggacaagggcttggcacttggtgggggggggtaccatgttaacatgttagcaagaaactaggtaggggtacttgacttgggggcagcagaagcaggtgtgagtgttggacaagacgagaactgagtgctgcaaatgtttggcaagacttgattgagtgcatattgtggacctgtgtctccactggagacacaaattagaatataacaccttgccctggtatgctcagggtctactgaggtggagaaacctgcaagtagagtcggagtacagtgttgaaaacaccatctgcaaccttaacacagtgctaccaaaaccgatttcggagcactcctgcaggaagtgggctggccagggcaagggaagccgtggagaacagtggcctctcccgggcaggcagggtaaggcctagaaagaataagctgagtgaaggtttgtgtgtggcccatccagggacctgcgacaggaacacagcggctgaggaacggatgcttggagaggagggggtgctttacatgccaggcgggcagggccggggtggggccagatgctggaggagagggctggccaaggggtggcagagaggccccccaggtggcaagtttgcaccctgttgcttcctgcaaggagcttttgtttacgttttcagcttggacagtctggctgtctggccaagagtgacaacgtgacttaccatcagagcgaagcaccaaagagcacataaatgaagtggagatccctcctgtgtccagcctccccctccccgtggccttctcctaccttcccagtcctccatcagtaccccggggccttgccagaatctcagaaagaatctctggactctggctcaggacctctgaggtgattatgcatctagaggcatccccaggtgctgcccaatttggggaagcagcacttcccgctggaagctgggaagtttcccctggctgggggtcctgtgaggatggagaggccagaatgaggaatgggttgtgagtcaagaccaaccagaaggggacttagcaatgtcagatgatagcctgggtgaactacatcctgtgtggaaaaggcaaggtgtaactgcttatttcttgtcaagtgagcctaatatcatcatgtttctttttatgcctgctcccaaactcagcccctcccagtgagatcacagctccaggaacttgcaaggaaagggactaacggggcatctgattcacccgtgtgcccttaatggcgtattgtgtgaataaagcaacaatttttagtacagggatttaaaacaacttctgcaaagacagaactaaaaattaatcttaaaaggtggagggttggggtggagggcaggaaagaggaggaactaaattgccattctctttggagactttctaaaacctaagacgaagaagaggagccgaattatggaaacaaaacctttgcggttttccacagaacaaaaatgatgtgaagctgcaagtcagcagttctggcgcaggggctccgggggacgcccgctccgccggctgtggtgtgcgcccttcctgctctcccctccgaggggctgaggctccttttgtctggcgcgcgcgccccaccccgccccgggtgagggaagagggagcgggcaccccgcgcccgcgccgccgccgtggaccaaggttgtttactactttccactccgaataacacgccaatcaccagggcccaccctccccgccggccaatcgctgcgttgggaaattccacctttccgcggggcccgggcagcgactggctggagtgtctgtcagtcaagtgggcatcccgcaaggatgcagcaggagtattagggaggcgatcaccagagcagaggaggagtaaccttccccataaacaagatgtgttccccccactaagaaagcgggtggagggtggaggagccaaaacacatcccagccccggggccccaccggagcgaagcgggccgagcgcagagtgcagagtcggggaatccctccctccgcctcccgccgtcgctgcagttgtaaacacgtttccctccatgtctgttttcccttctctctcaccgtggccattacgggctgctgtttacaaaaatcctgcaggcctttgacaccccgtcctcccttcccccggcatccctgcccttattctggctttcttctcttccatctcctggtgagcacagcatactgttctcaggcttgttttccttttattgctctccatgtgggacaggtcatgctttatcaacatgtaccattttctacaaatgccgcccttcctctttaaattgcttggatgggcagatcgattttgattagcaacactgcagcagaaacaaggtgcatctctggaaggactgggtggttttctcgttattgttgctggtttgggtcacatcggatgctattttaaattctgtgttttattccacgatgggtcttgaatcctttccctattcctaggtttgaaatatgtttcctccctttaaaaaaaagaaggggggcagtattgtgttgaaccaaatgtttttctaccttctcctgtgatctgaatcaggtttcccatttccagcagtacaatgtggttgtattcagtgtgataggggcgtagtggacatgaattatttgcgacagggctgcctggaagatgcggagcggagtttgcgtggcccggagcagctccagtgtctgaggcttctctgtgtcacaggctccaagcaggaagcgcaggcaaaatggcaaaatacagcatgtggcattcagttcaaaaatgcccttttttagaagtcggtattctaaatgacatccagtcttgcttagttttttaagagaaaggaaaaataatctatgaagatggtttggaatattttgtgaaaagccttttcagcataaaaaagatgatcttgagggtctggtttgcggagtggaggataagcctccctcctgcgattctgaattgctttttggtttgtaggaatttcaggaacatgttgcaaagccgtggccgcttgaaagggtcggtgccctgcgccccgtctcagcccctgcggcccctgaactttttcagtgatggggcacttggggagaagtgcggggagtggaggaggaggggaaggtgcattgcaaatagaaatgtaaggcgtggcctgggtggccaggatgtgccagagcagcctccagacctacttaaatcccaggaaaagtcctgcctcaagttaggcacaacatctgacttggatttctctctgtttttttctcttccagttgtctgtctgtgcgccctctcccacaaggaatagttttccacactgatggaattaatgcatatcgtggtattattggtggaatatgtttaacctttgtttcgtgatttgagaggaatggttcttgtgtatcgtgtggtgacagcaggttaaggagagtgtcagagctggtgcagagttttgccccggggccatgaggttctgggcatcatgactctcttatgaagttacaaaactgggcaagtgattgaaggcagaaagacactgtaataaagtgtgctccagtgatgtgtgctccggcttctctcccttactcatctgggccaggtgctttcgccacagtgagcctgggtgtcccctgcctgagatgagcacagtgatgtctatgcgaggttgtaggactcagtgaagtgccttagggattttgcctggcactctcctgggctcatgaggtgcctagggctgagacttccccttctctgtctggtaaatcatctctcccattctttcttctgcggcccttcatatgagctttgtaatttactcagggtggcagggtgaattcatcttttgctgggtttctgcatcacctgctcctttctggccaggtcagcctgttcattttttccatgccaacagcctctaagtgccagtaagtcacgtctgaacaaccaaagcatgtttccctgcgggagaatgccagggcaggcgggtctgggagccaagaggatttctcctgttcagataagtcgggggaatagaagagccctgtgacttgagacaagctttgagtgacacccagtgaatctcccatcactactttaatccctgccccagtgttctggttccccctttcctgcatgaggcagtacgagtaccctggcctggctttgggttctacacggtctgactttagcctgccttggtctttgttcccctctcactccctccacccctgccccccccaacacatgtggagtaccttaccctgccttcctagttctggaatggctgcccctgtgccaggccaccccattttctagaaccaccttcatacagcccctgcgcatcccactgtactatttccttgtttgtttttcctgtcaatcttgccttccgcgctaatgggacactgatgctgtatggtgatgtgttctcccacagtcatcttttcctcctgtggttggggtggggagctttctctgtgtccccccatgagagtgaggacagtctcatttaatggcaccatggtctgtggagccaggcaggcctgtgtgtctgactccacttcagcgctctcagccagcgtgggcacctcggacccagacagacgccccgagcctgtctttctggagaaggaagtagtaataccttttccttgagggagttatgaggattaactgtgcctggccctgaattcgtgccttgcaggtacttaggaagtgagttattacaagcagtgctttttatcatccatagatggagatgttatctatgctataggactgcagaaagaattacagagaattatgtagaatcactagggacttgattaatatttgtttacctttcccccacatggattgatgtcctttattatacttttgtacccccgcttggcaagcccttgacaaatattgatccaacaaaaaattagctctttaatgtatacgtttagaacctgttgctttgtcagtagtggtttttatgaaaatgaatgcttataggtcagacttctggaaaccctaatctgagggaattgggccaaataggaaagtgagccccttaaaggcagttgtctgaccagtacttggagcacaacaggttcttgctaaagcactgtgtttttaaaacagtggagttattaggttgaaattctgaatagcaagaaaaagaataatggaagtgctgccagccccgtgatgctggtgcagctggtcagtttgcagaaggaggccagttactagagcagagtggccgtagaggctgcaacacggtggccaaagcatgaagctgctgtatagtggcaaggtcacagtgatttccccacagcctcggtttagagggagacggggtgtgctgagctgtgcctgcttctgtagaaggggccttctccaagtctgagtagccttaagccattaggactgctgagtctttctccacaaaaatatgtgggaggcctgcagggcaggtgctcaactaagctctggggctgcaaagatccagagccatgcccctccttggaggcaggtccttgtagacgaggacaatcgtagccttcctgattaaagcaggaattgtccaatcaggctatatgacgggcatcgtccatagtcttcaccaggggagcttttctgactatacatctctagccctgtggcttgagccagtcacttaatttcccctgagctttggtttcctcctcctggtagcagagagactatcagagtgaggggcagatgcaatagcatatgtaaaacacttagcgttgggcctggtgtttaactgcaataaatgttagctcatattttactgtgacatagatgctgtatgccttttgctgagtattaaagatactgagctgtagcatgcatacttgcatgaatcagtctgctaagttattttaagtttgcatttgaaaataaagggtggattgctatccaaatataaagaattggaaccaggctctaaaaggatgtttgctgttctttagcaaaataccattcttcttaagtttcattcaatcattccacaaaaatttaagcatctgttttgtcccaggcaggcactgtgcttgtaatggatgtgcaatagcaaacagaacacttgctttcagctcacacagagctgactcctgggcagagaatttcgacagtaaagaaatacaagtgtgatgaaggagaaaccctttggtactacctgctacatgttttaatatttaaatgttgacttagggaggtctttccatctaaaaataatgatttgccctttctcctgtaaatgacccctttctcttaagttttgggtgagagattttttttttttaaggaagaaagatattctacaatcgaatgtacaactgagataatgcttaggagagaatgtatactgggtttgtgccttggaagttgcttaggggaaacagttgtgtgcagttggaaagctgatgctttaaagaagcttctataaagtgaccccacaattaaactgttttgtgtacatctttatttatttatttatttattttttaattgagacagagtctcaccctttcgcccaagctggagtgcagtggtgcgatctcggctcattgcaacctccacctcccaggttcgagcaattcttctgcctcagcttcctgagtatctgagattacaggcatgtgccaccacacccggctaatttttgtattttcagtagagacggggttttgccatgttggccgggctggtcttgaactcctgacctcaagtgatccacccacctcggctttccaaagtgctgggattacaggcgtgagccaccacgcccagcctacgtctttaaaaataaatgtaaatacccaaggctcacagttccgttcttccatctagtctagcaccgtccagtggaagtttccaccatgatggactgttctgtggatgccctgtccagtacaggagccgctagccacatgtggctatggagcacttgaaatgtggctagtgctacggaggaactggattttggatttttttaaagttttaatttaaatttgaatagctacatgtggctaatggctactggacatcacagatctaacacaggattaactgacaaaattctttcctcttaaaaatatgtgtttattttgataaggataactgagacctgtacattccatttttcctgtcatatttagggctcataaagggggtggtatgcacgttttaaaaaatgcaacacaaccagttaaaccagctgtctaattgtacacatttcctggagctgttggtgttgattattagcaaatactaagtacttgtaatgacctaagaactataagacaagcaagtcgtcttctgtaactgagtatcagcggattcaagcgttaaggaaaatgattaagagaaaacaaccaaaaaagtcttaatggttctgtcaatcaagtggctatcaattcatggctattcaaaagcttttgtggctatgaaaataaactagattgaaaaaattctaaaacaaaattgaaacactcatttgagtttaaaattttagttgagttgatttttatttcttgttttggttcatttgtagtttccccccgcttcgttgtttcctcagatatggagaataaagcctggctggtcagtttcagtttttatttaaattcattttgtcttcattccttttaatctagcacagtcctgtgatgtattgggatcacagtgctctggggaaacattgaaatataaaaacattttcctgaaaacatttccagttatatttaattttcctccttgaatagaaaaatatttccaacttaatcctccctctcccctcttgaaatgaattgcatgctttggaaataacatcaatccacccaagtacacaaggacaatctcagccatttaatcgagatataaaggcttagagaactctgggcttcggaggcacagactccacctttcaggatgctaataaacgtggacgaggtctcgcctgggcttcctcctccattgttcagcgcagcaaaccagcacagcactccgtggccagggtttgcggggagaaatctctcactctgttttagtagcatcatcatccttatcagcaccctgcttttatttttgaacagccaaacttcctctttccaaacttcgtgtgacatctgggaccagctatgtttgaaggagtctgaacatgccacatagtggctcacgcttttaagggaggaaggccagtaagcctcctcaatggcagaattctactttcagtctaccctttggttctgttgtggttgttccttagaactttattctgctcattaggaagcccagcctccggggagggtttagcttctcatctaagcaagaagtaaaatgtcataatggaggaaaaaaaaaaaaaagtccaaactttttttggacttttagaaacacatccagtttgagctccactgagctatcattgcagttacaaagcccatgtatattgagatcggtgtaaaaattcagcatgtccacctgcataattatgaccagtgtattgaaagcacatttcatttagttttgcaacagccgatgaggtagattctaccaacattgttttacggaagaacaaatggaagcctggaaaaataaattgtctacctcacacacttcgcaggtggtaaacacaggatttgaactaagacatacttgattttaaagtgtttgcttttcctttgcactactgcatctgcgatgtttgcactcagacactctagaatatttggtgttgcatgtttttgccccaagaaagaacccattaaaatgaaactttccagttcgtaagctttgccctcaagaagggaaagaacttcttgcaaggtttctgaaacaaaaagaaaatgaaaagtaactttactgtatctgggttttctgattaaattacggtttttgcaagcttgtgcatttctcagtgtccagatagccaggatttttccttttaataaatatcactttaaaaaacaaacacacacattcttaaatgcatgattaactgtatagattgatttagttataagatgtcctagcctaaatataagaaggtgtatgtgttagaattaatttcttcaataaagagaaagaaattcaggaattgtggttctgttggtcttctgtactgtatatttttgtgcagccaaagcagcatgccttgcttcttggtttcatgaccacatgggtagtttcttgaagttttttcttttgagatggagtcttgctctgtcacccaggctggagtgcagtgacgcgatctcggctcactgcaaccttcacctcccgggttcaagcaattctcctgcctcagcctcccgagtagctggaattacaggcatgtgccaccatacctggctaatttttgtatttttagtagagacggggtttcgccatgttggccaggctggagtttcttgaagtattgactgatccttgactctgaactgtatgatcaaagacttttgaaatggcacaccgtttcttaacatttaggccaatttcagttgctcatatccaaaaataagtcatgattttcggagtcagtgcgcagcacttagtacaacaatccaaacccttgtacagaccatcctagtagaaatgtggatcttgagtatctcagcttcttagtagattttgaactccgtgaaagcaggagccaggcctctcacagcaagtctctccaatatgctcagtaaatatttgtcagatcgagcaatgaccagatgatgaaatacattaaagccttagggagaactgagactactgcaccagtttttgtgcactatcatgctggaaatctttccaacatgtattctgtacttctttgcttcttactccagtgaatataatttagtcatttctggccaacttgaggacatcagcgagcataaattgttgtattatgcataatacagtgataccctcaaggctgagtgggaggcagtttgccctctgctgaaggtttcttgtgcttattgtgttcttatggtttggttttaccatttttatgtctccatttctgtttaatagacttatttcagtaagaagagaaagccgtctccatcagcccctctgtaggtgattatttgccacttcctttttgctgtgagtgctttgaaaacagatttctaagcttgttagagttatgtgttaagagtaaataggcagtaagtgaaaccaagcttcttcctggtgcttgactaccccagaaatgtttatttgctgaatagttgagttctggaaaggtgaggtataaatgtgtgataaatttattcctttgcatgatttttttttctttttcttccctccctccctccctccatctatgtctctgtctttctctgaacatctctccgtctcagtctgtctctctcatgatagttgctggaataatttaaatgaatgtaactcatttacccacatcgaagcccaactcagtagtgaaaaaacaaatcttccaaatgaatgcactttccccttgatgtgctatatacaagaccttggcacacctagttcaatgacatagtattttagaagggcctccttacaccttcctctcagataaatatacatgcagggacattctgaagaagtttgttatcggtcttctcccctcctactattagctccgccctcctagtccttctctttcaccatgctgacccgcgtagggaggacccttacaccctctgcatgcagcgctggtgctccttagtgttcataaccccaacctccatggcctctctcgcagttctcaggttaggccctgcttctaggggacattagctttccaccctctactacatacttcctagttgttgcagcctttgcaagcaaaacttgttttcatttgggagacagcatggtctgacagagcctagatcctggggtgaagacattctgggtttgtatcccgtctttaccacctctgagcctctgatgctggacaagtcagcaagtctttgcaccttagtctcctttctgtaaaaaggagcttatggggatgtaatcagagaagccttagcatggctcttggtacaaggcacggaccaaatccatggtacgctcactcctttcctttcagtaatactgcctaaatagggcacatgtacctaaaaggattttgtacattccttgacagcagaattctcatcttctgttgcatatcccataatgctgggaacacaaaataaaaatggtagcttttcacattcacttttggcctcaattttttgttattccccaatgaggatcatttcatttggggctggtctccggaaaaaagtagatcaagcttttcagatgagatttgggtgaaaccctgacaaactctttttattgccttccctaccacatagtggtggatcaggaaactgtagggcttatgatgctgggaaatttctgctaatgcaataaagatttttgctgttgaaagaatttgatctgttttatgtataacatgcagagagcagaagcatatattatctgtagcagatgatagagcagggtatatgggcaagttagaaaaacacagttctcactacatttgaagaaaaaggacaaggagttgtcacaaggatccaggagagtcgcacataattttctgtcgtgcattttgttgactgttcctctttgcatccttcaaccatcttaacttcccacttgcacctcgctggaagacaaatctaagctaaattaaatgctaggcaatatgtcagaatggaaagggccctcaacttgggatgcccggttctctaccagcctgaataaactccagcaacagtatttctctaggaatcatctgtaaaaagtagaggtttgtcatatctctaaactagggattcaccttatttattaagctatcagtgactttatcttgaggtgcacggcttttagtaactctggttcaagtgcaaggaatgcaaagttaagtgtatcattggaggtgggatttttgagtttgtcagtcatttattgatttgcatgtatccttatagttcaaaggtctttttctcaacttagttgatgatcatgctgtaagttgttttcttttgctttatcaacttttaaaaacgtttattaactttttaatttgaaataatttcagacttgcataaaggttacaaagagtaccaggagttctggaacaccctccacccagcttccacagatgttaacatcttacataaccgtaatacggttatcaaaacagtgttcactccatactccagtgctgttaatctccagactgaattcggatttcactattttcccactgatgtccctttttttggttccagatccaagagacgatcctacctggcatttattgtgttcagtttttctaattctgggacgttttcctgggttttctttagtcattcacgaagttcgcacttttggagaacatggggccagttattttgtagaatatctttctgttagagtttgtggatgtttcctcctgattaaatttggggggtacatttttaacttggagatcacagaggtgctgctgtttgtgtctttgcgcatcctgtcaggagatgcgtgatgtttcctttcctggtgctgttagctttgatcccttagttaaggtggtctctgtggcttcctccattatcattactatttttctctttgtaattaggaagaatcttttggaggtagatacttgagactatctaaacaagcattctgttcctcattattctttcacccactaattttaacatccattactgtgatgtttgccaaatggtgattttctatttctgttttctacacttagtaattggattctactctcaggattttatgtattttttaacagtgagggacataaactttttaactagcagtggcaagtccacttttatttgggaggacaattactagtcacatgaagaagaaaaaatatgcagaagcttaagaaatcccacatatgaatgttatttgaaatgttcttgccctttctccctacaaaggaggtgaagaagatgacaggagatgttaattgccaaaatagtctcatagttttggtcctggctgcaaatctctcgtttttgatactcaagagaatgctattggggaactgactctgaagcacagcccagatgcttgagatgggttgggaaggtttacatcaacaccatgaatttaatttatcatgtgacattttatttctgagtttttaaagctgtaattaaaagaagtgttcaaagtgttgctttcctcttttagaataaacgtggctgggtgtggtgcctcatgcctgttatcccagcactttgggaggccataggcaagaggattgcttgagccaggagtttgggaccagcttgggcaacatagggaaaccacatcactacaaaaaaaaaaattagcctgtcatggtagcatgcacctgtggtcccacttacttgggaggctgaggtgggaggatcacctgagttcaggaggtcaaagctgcagtgaggtgtgatcatgcccctgctctccagcctggacaacagagcaagacactgtctcaaataaataggcaaacattaccaacatggcaaacaagttggaggaggccccctatttaattaaatttcagcagtcccaaatctaattggtatgaagaaatcattattcagaattttccatcactgaaatactaaaatcacttgttgtttgagacatcttggcctgtcacccaggctggagtgcagtgttgctctcatagctcactggagcaggagcctcaacctcccaggtttaagttaatgctcccacctcagcctcctgagtaactgccactacaggcgtgtgccaccatgcccagctaattttttaatttttcgtagagatggggtctgtgttgcccaggtccctcttgaactcctggcctcaagctatcttctccagtcggcctcccaaagggctgtgattacaggcgggagccacagcgctcagcctaaaaataactctttagccaaaagaaagttttaaaaaattgtctgttgtattctttgattttactctatgtggtcttttctattatttttaaaataaaaaagatttatactcctcaagtgtaacattttatcaaatctcatgcttctgtttgatgaaaccgaatggctaaattttttaaatatcatgcaatccatcccagtttgtaattttattatggccctcacacaagagcgtgcaagctatactaagcttcctgtggccctcgtttttcctcactgatatttgtaactcattccaaattaaattttaggagtctgaaatgtagctgttatatttgggagatgtgaagaaaagaatcgtaggcatctcagtaggctaggtatcagatcacacatgcttgctggaccaaagaggactccttacagtaggatacatgattctgagttagtttgtgtactaagtatatactatatagcttttgaaggggagacgggcacagaattcacaatatcatgcactaagggttattttgtgtttgcagtttccagatgaatgttttaaagttggctgcagaatacagcgagataggtaaaatctatttgagtattacttacagaccccaaaggatatcccaaaggatatgttggactaattcctaaaatatcctgtaagtcattgcaggtacaggcgtggatctgggtttggaaacgccgcctggatcgctggctgggctcctgcagccgccaaggaggggctggctggaggtggggctcggcgtgcatagcggccacgtgactgcgccccggccacgcccaccgtccctcacgtggtcccaggccacgctgggcttcggcatgtgctaaagtggatagaaaagggagtggggcccgggcgtggctttgtggtttgggaagatatgaactccttggggtttttttctcttttaattctttaattttgatatttggaaatgcgtaaaaggtttttcatttgtccttgaccacgtggtccaaacctcaatttccctagcagaacgcggtttcgatcactggtggatccgtctcacagcaccagtcatgctgcctcgctgggaagtggagggctcaggattcccgtggttcacgatccattttatgttggaaggaaatcattttgaactatctcagtacacaccctagtgtatctttaaacctaattgagtgttgatggaaaatctgcggtccgagaaccgtaagaaaagggggctcccacctcccgctctggggtcgccacttgcctcgcaggcaggaggaggctcccagagtagatacaacttgcccgtcacccggatgggttggtagtgcacatatgcacggggcgcagtttaaaatgaaagtaaaagatgcaaatgtgtttgcaaaagaaaaattaacataggatacgtgcgggcgttctcagttgaactcggtcttactgttccacgcgagcaccccatgactcagagcccaaatctcagcggaacagcccaggacgctcctgccgtccacaggaagacgcctctgtctctgtcccccgccgccaccacacagatgcacgtactctcttcacttccgtgtacccagtaaatgcagatcctgatttaaatctgcagcacgctgctttcttcccattgcatgtgggaagcttcaggttctcttcggtttattttctcatcacctttattaaaatgcagtaaagcaaggagtatattaatgcgggcctctgcaaatagagggaatttattgaaaagcagaatggcttgaaagattgaacttcatcttaaaaatcagaaacagactcttgttattaatagctttagaaacgaaaatctaacttctgataaattatttcagaggagtggttcaaacgtgtagtagatagctctgcctggtcatcaattatagtgacgtccttgcatcagctccagaaactcagaatattcatgagctttccagtctgactcagaccttcaggagccatgaaattttcctgttgggatgagaggaagcgctggcggtcgtttcggcagcttaatgaaaccagaaatagataagcacgagtgaggggtgatgtccgcttgtttgctcccatcatgttgtttttaatgtgtgaaagtgaaagttttaaaagtcatactaaatgtgtgatcctttttagaattcactgggtacgggtacgtggaggaagtgtttttgtttttgtgaatttgtttaaacaaatgactgaggctttgttttccactctgtctggccaagcaccattgctacacttttttaaattcatgacatcctgagcagtgaagctgttcttcagcccgcctctccatttgtgactggaagacaaggaggcagacaccaatggcgcctctcacaatggaggtttatttttttttaatctaacggagggattgtagatggtgtaaaacttccttgtgccaggagagaaagggggagagagagagagagagagagagagagagaaataacccattctaaacaactttaggaatagatgatccgtaggcatcaactttgcgcagcaacaaaagccactttctgaacctcgttctgtgaagttttaaaacaaattgggtttgtttaattaaaatatttcttaaaggcaaaaagcactgagctaatttttaagaattttaagttatatattaatatgagtagtgatttataattttctgttgaaatacataaattcgagaagccccacccctaccacttgccagtcttgagtccccacggctcctttgcctaggtctaaagtcactgcttgcacactcctgccttgcatatgccttgccatcgtgtgggcctcttggctggaagtgttcttgtcctcccgttaggtatcttttatgacgtgaatccttacctctaattattatctgtgtgtacatctcatcacctgcatctgactgtgtgccttgtgtatgtctcttagccctcacaattgcctgacatgccttacaaacgggtagaccaagtgttaaatgaacaaatatttaataagaacttaaaagctttttgactttatatatttttaaagccattgtgattaaacactatgtttgatgtggtgctaattctgtgctttatcaactgtgtgaattgtagtatttttaaagtaggaataattgagaaatattttgaagttaggttaagcatagcagtaaagtttccactttttaaaatagccaaatccaggccaggcgcagtggctcgtgtctccaatgtcagcactttgggaggccagggcgggcagatcgcttgaggtcgggagttcgagactagcctggccaacgtgacgaaaccccgtctctgctaaaaatacaaaaattagatggttgtggtggtgcatgcctgtaatcccagctactcagagaagtgtttgaacccgggagttgggggttgcagtgagttgagatttcaccactgcactccagctggggcaaaagaatgagtgaaactctgtctccaaaaaaaaatcagagcgtggtggtgcacacctgtagtcccagatacttgggaggctgagatggaggtcaaggcttcagtgagccatgatggcaccactgcactccagcctggacaacagagtaagaccttgtctccaaaaaaaaaaaaaaaaagccaaatctgttgggtttttttttttggggggggggtcctttagaatggccctgacagatctttaaggcatggaaatgagccttatgcaagctcctggcaatcagtatgtgagttctgtctccttggcaagatacagcctcttagaccctcagtctggggaaataatgctgatttctcctacgagttacgagaattacgctagaaaactctgtggcgcatacaggtgccctgtagcctgttggttagaagcactgaccctgaagtcaggtcgcccaggttggaattccagctctgccttcttcaagctgtgtgactctgggaagtcacacacactctctctttgtgcctcaggctctggttctgaagatgggaacggcaggccctccctctttggcttgttgcacagatgaaatctgacagcgtatgccaagcgcttagcacgggtagcagtgagtgccccgtaaatgttaggtaccttcctactactactaaacattcattcttcccttccctgctagtacctgcagctctgactcatctcacacccttgagagaggattatcttcattaaaaagtttttggtctgcccagaagcaagtgttacctgtgagagagctgggcttgtgcataggttagattatttctttgggttattcctggggaaacctgcaaagaaatgcagccagaggcctctggttcattttactgctcatctcctaaaagtggtttctcagatttttatcctttttttctctttttcgaggaaggggcaaggaaatattttttcatattattcttgtcatcgtctatttatttaataacagttgactgttgaaacataggaaagtacttatccgccaggaaactcccttctattattggacttacttgctttccatttatatgttgtctaattccaaagagatttcgagacagctttcaattaaaaaaaacaaacaacaacaacaacaaaaaaaaacaccacataccgcatgggtattacacaggacctgtatggtcaaattggcaacgaccacaccacatgagaaggaagattattcttcctggaacctggctcccttgagattcttttttttttttttttttagacggcgtttcgcccttgttgcccaggctggagtgcaatggcacgatctccggctcaccgcaacctccacctctcgggttcaagcgattctcctgcctcagcctcccgagtagctgggattacaggcatgtgccaccacactcggctaattttgtgtttttagtagagatggggtttctccatgttggtcagggtggtctcgaactcccatcctcaggtgatccacgcgcctcaccctcccaaagtgctgggattacaggcatgaaccaccgcactcccttgagattcttgtaagccaaggcagaagaagagacatcttaaagtctgtatgtgcacacctgcctccccccattttatatacaattcaagggctttgcttttggaaagtttgcctatgtagtcgtccagggctaaattaacacctgtctctatctgtgtgtaaggctctctgggaggagctgtgaggcaaataaaaataaggaatggtgtcccgcaaggagcttacaatgtgtgcattacaagtatatactgagcatggccctgggaacacagtgaaaaaacaggattcctgccctagtacagtgtacactagtggaagagagagaggcagtaaacctaaaagtaagtcttttaaaaactgtggtaaaatgcacataacataaaatttaccatccaaccgtttttatgtgtacagttcagtgacagtaagaacattcacattgttttgcagccgtgaccatcatttatattcagaactcttttcatctcgcacaactgaagttgtacctattaaacagtaactcctcattctctcttccacctaggccctggccaaaaacaaaaataagtctttgattgtaaacacgatcagtgctttgaaggagatgggaaggatgttatcataaaatgatggggctgcaggaatggcacctactcagagagggcggtcaggagagacctcttgggaatgatgacatccagcaggcaggtcattaaggcatctctaggcaggtccagagtgcaaggaggcataagccaggcaggtggaacagcgtgtgtgaaggcccagagtcaggaaatggtctgcttccttccaaggaaaagaaaacagccagtgtggttggagcaggggctaggagagaaaagatgtgcatgtgtgtgtgtgtttgtgtatccccatcatgatttagtactgtcagcgcttctgtgttctgaacctggagtacaggcagacacagccgcatcccagaagctcaagagtgcccataccaggaaattacagaaatctttgccaaatggatgagtgaatgcaacttccttgatacagggtcagagaggggaaatctgagaaaagcaggtgggcaatgtactcctgacatactcccttccgttgcaatggccttgagtgatggagcaagagtgaaggaatgttcccatggcactggcaccaggatgactttttgtgaagcagagcagttggtcttagatagtggaggtgcgggaggcatgagaactgggcagtctgacggctgcaccagccagttggctgtcctttccacctccatgcccaggagctggcccagggcgcgcatgcacaaagccagtgctcttttcaatcagaaaacagcctgcgtatgttcttgcttgcaactcagatatccagcccactgatccaggaagagattcctttgacctgggaagtcataatggcagatatttagacccagctctcaagcaagcatccaagttgttccggtgaacccgtaactttgagtaacctctgattgaaccagagagtaggaactaggtgcagaaccttgttgaatagaattgtttagcatcgtccatttgttagagcatttcaggatgcctgtcctaaaatttggtatcataatggtatttacctctcactcacctccatctcagcccagtaattaataacaagggacttgcttcttcacctgtttctttattggttgtaggaagtcttttccttaccacagaggaaggagcttctggatccctttgctacgtccagagagttttcatctaatctgggtgtattagtccattttcacactgctgataaagacatactcaagactgggcaatttacaaaagaaagaagtttattggactcacagtttcatgtgactggagaggcctcaaaatcatggcggaaagtgaaaggtacatctcacatggcagcagccaagagaagaagagcttgtgcagggaaacttccattttaaaaaccatcagatcttgtgagacatattaactaataacagcaagggaaaaacccaccccatgattcagttagctcccggcgggtccctcccacaacatgtgggaattataggagctacaagatgagatttgggtggggacacagagccaaaccatatcactgtgtaaaagttgaataaagttatttaggagcacattgtattgggagtttgtttgtttgttgaagagccaagtaaagtcattggaagcatgggaaacttttttccctgtctaaaaggaactccttcctagtggaagttgaaagctttcttggcagcctcagcccccaccctacctccaccaccccagtgggtacctgcatcctgaagacccttcacaatagcatctgaactatactgggccttcaaatgatgtcttgggtaaacccatgtccaacctgcactaaatgaagattattttcgagcgaatggattgaagaacagtgctgaaaaactagaatttgtaatattttcatttgagcagaggtgaaatttgaaatattttagaatcttgtcttatgattttttttctttctttgccacatagccctcccctggaaattaaatctgtggattactagtatatgaactgatcagagacatggcttggggtctccccatttacccacttcccagcacgttataatccactggacacctccaaggatgagagaccagcgggtcataatgcgagactggacatctctcctaccccatgtacacttcagctgagcaggcagaattagcagagtcaggactagaagttcagtctagggatcaaataataatagtagctaatgtttaaagagtacctaagatccgccaggagacatactcagtatagttccgtggtttgccacatttcatcttataccagtagcacaggtgaaatttgtcttatgtgtatactgaggaaaacaagtccctctgatacacagcagccaataaatgacaaagctgggatagaaacttacttcattctaacccgagagtccctgttcttgcatgggcacagcctgccatccccatgctctgcctcctaagcagaggatgaacttaagcatcttaaaattttaaacattgactttccctaaaaccaattaaaaaaaaaaacaaaacagacagacagacatgacttgtgcccttaaaaatgcagccaggctggcatataaatgggcgtaggctgtttctaaattttttgctttaaattttgccagcatagcttctggactggtagttttgtttgctttttaatatatttttgacactgtgtacagaggaatgctacctcgcgtcatcatgtcctcctccctgaaggcaagccaaggatgtcaaggggccacttcaggggatgtgcaccctgaaggtaaagctgctccagtgggaggggttggggtaaatgacaatgttagcagctggtaaatttttttacatgggatatctcacaagacttattgatgcatgttatacgtaataacctgaggcacatcaacattttccactttttcctattctttctgtattttcactgatactttttttcaaaaaaatctccaataagtttaggatcagcttcaagatttctctttaggtaaatagatttgtatttttgatggccatcctagtccagtgtaaagatatggacaagaaaccccacataaaggaagcaagatcgctggctgctttctctaggtagcttgagttgtatactaatttgtagattatttctcttcatcgaaaaaacaaaacattctgcagagggcagtcatgtgtccgctgtgcctctgctcctgtgtgcaccataaaacttgaaagtgagccagaatttgaaaatatcggattgggatgtgatttctttaagcctctggctaatttaatataaagtgtttacacttcatttttctggcagtggattttctatgtaggtggtggaagatttcctgtaagttttgcaagttccagggcaaagagagttgcaatatgcaatatctttctgtggtcacaccaacagaaagggcgatttcttaacctgctgcagttaccatgtgtgtaggtggatgctggctattacagatggtatcctttcaaccctcaaaattgttgcaagttcacaggtatgttaatgaaaatgaataagtggcatttttaggaattccaaatactgagtcttggaagtagataatcttttccctaaatgtatgctccggtcagaactgctgcctaccacacctcgtgggtgaaacagatatttcgagcatgactgagcttattaagagccctgcggcgcttcctctgccgggggtttagaaatttcaaaggatgggggttgagggagggaggagttatgggcatgtgatgtggacagggcgggcaggaggatggaagtaacaggtccaaaatgtatctttggtggcccggcagagctcttgcatggggtgagaatggtaatttaggaagagcaagtcttcccatctgtgaagcagaagaaaaaagtggacttaaggagaagttcgggtgctgtttatttagataggagtaaggagagtgcagttggggaaaagcacttcagaggctttacttagactagcagaagtctgtttggcagggtgggaagcaagtgcagttgggagaaaaacgttttcaataggcagtttcagaattggaaattggaggagggcagtccatttcaacatttccaacagtattaaagaaaatttgcgggttgtttgtcaaaaggggtcatatgctttaaagattgagagatcttttcggtgaagtaggggagctggggacatcgtgatgtgacaagagccgtgggctcagaggctggggacctgggtgtttaacccaactcttgtgagtggtgtggctttcatagctttggttctctggtcttcactttatctgccaagtgaagacatttgactggatgtcgtgatcttgagttgctttcagctccagaattcgaagaccccttccattgggcattcatctaatttcaaagatgctccctggctccagctctgcagtgaagcagaacaaactgatacagcctagcttgggggtggggagtcggccctccttttcccctcccttcccaggtcctctgggtgattgggggaaactgagaagccgttctcttctccagagcactccatttaacaagcattgcagagcctggctcgtgctgcagtgaacaaatgctgacttcagcctttaccctgggtttcaggtcacactgattgtttgcaaaacatgttctttttttgtcacttgccagtacttgttctctgtgagtaaaacacaaacacatcctcagggatgttgcacaccagtttgcagcctgcagcttctgccctctggcctgcccaggtcctcggctccgggacgaggatgctccgggatttcgggagacagcagttgttttgacatgaatctcaaagttcctacaaagcttatttctttgaagaaggccaaaaaaaaaaatgaaacattttcagatctttgttttcagattattcaagtccagaatgttggataagatttttgaagaagagatttatgcttgagattccttttagtttctttctttcttttcttttcttttcttttttttttttttttaggtgacttggccagtttgggtttttacggtgttcagggaaagggttaagaagttaatttgggaagtacagtcatgtgttgtacaagttgctgtctactgatcccttcattgagcaagtaaacttcacacattctcgtgtctgcaaagcatgtggatgcatgggcagttatgtgtatgaactttttttttttttgagaatggctttagtgttcagaccaaggatggaatgaaagatcacgtgtgctttccactgtagagctgccctgcttgttttgattttatagttattctaagtgttaagttccttcatctttcaaagcaaattcctttgatccctgaaaatcagctaatgtttgggaggcaattaaaagatgaggctgtggggttggggtgaaggcttccccagcaggaagagaggagaagcccactggatctgggagcacggtgctaggactctctaagcgtgacctccttcagtttggcccagagtggtcagatagtttgccggggcataggatggatgacaggcctcatacgcatcacgtctgaagggaaagcccttgaattttccacgctactttttagtaacagtaggctttgtcataattggcttcatgttccagctttcctaaaactgtaagtgatgttgggtgggccagcagcaaaataattcactttacaatttgcatgatagtctggaatgaaccgaatacctaaaaccaggaaataatagtagatatttaatggtttggggatcaaataagaatttactcccagatgtttcctaattaattggaaaaagcagaaggttgctggaaggccatctccattgggcatttacaggtgaaattcactcttcaactaggattttactcatgggatgcctgtgttcttcatttgaacccaattttacctatcatctacaaaaaaagaaaactattaagagttaaaaaaaaaaaaagagagagagagtcttgaactttgaaatccttcatccacgttttataaagtgtggggtcagattttttccctagttgaaattgaggaaatgagagttgccaatatgattggatttgtactgccaagatggggttttagcacttctaatgcattctggcaaggctggtatacttgtatcaagtgcacagccccactaccaccagctctaccacccacaaaaataaaaactagcaaaataaaatatgagccaacagaattctgtgggaatggcaagtgttttgtttttgtttttagtagtaatctttgcgagaacattccaaagatgatagttttacatttgtatgtttttttccgaggcacttttgaatcatcagatagattaaatataagttccatgtatttttgaaggtgggagtgttctttggtacagttcccccaaaaaactggttctcatgaggcttatgtggtaattctgttaacgagaatgtatgattatctgggatactctgttctgctctccatcctggataagagtttactttgaaagtctagttgatcttttgtgatttctgcacaatgtaaaaggtactttaacttcaggagatagggccagcaatcagatttgatgatggaaaagagtagtgtagcatttaagcataatgtatactctataataaatgtttacaagtccaaaagtgtgccatcagaaagtaaccagatcaaaggagaggtgaccagagaagctggaaagataagaaataaacaagtttcaaggttactgatctgtagctgttgctgtccatgcttcttggcagctttaattatgacagggagagggacccagagggagagagagagactgacttacacataaaggcattttatcacaaagccatctaaaacaaaagtgttaaaggcacaatgctgtgtttaaaaagcatgtacttctttaagagctcaaatttaaatatataatacaaacttaagatccaaggaagaaaatggacccaggacacgaagagaagttaacgccacaggtaatgcagatggccaagagatgtgtgaaaaagataatccagcctcaccaacagccacagaattgaaatgagatacctgtttctgcttctggcattgggaaagaaagaaaaatggcactagcagccttttttttttttttttttttttttccccaaaaaatttgctactcttgaggttctgtcaaagaatgtgctgtggcctctagaagcatttttaaaaagagactttcacaagtgattgtgcaaaattgtgaggtcactgaataggtgtgtatcctcctaaggaggtagcgttggaggagctgttcttgttcaatttactcagcacctgtgaagaggcttcactgtgatttgcctgtacaggtgtgcaggtaaaaatctaagttccacaggtagtgcaaaaaaatctacctccctaggtacctcgtacatttatcacagtttcctggtaaacagttctgctgttgttgacaaaattttatcagaaacattgcatactcttctctaaatagtagtttccctacaagtggctgtcttcagtttagtcgtttaagttatgttgacataaatgattatgtgtgtggcaggggcttttgcgtaggttgttgaaacattgcaccttttggactaacagtttttaccaaaataggcagaagtgacatttgcagccacagctgtgtggcattgagcgtctaaggtatgtgtaataggcagtgtatcggtagcattgataccttggtcaacaccagtaagccatgtaattgcccagaagtgggctctaacactagttttaggagatgcagccaaaacgacaaagctggaggcctctccctctgagcttggcctccacttggtcaaaacagtccccagtttgtccctacgggacacaggcctgccttgttaggaaatcagcaacatttaggagcccacaatacctcacataactctgtgtacagtaacagagaatggaaatagggctgtaagcatgaacaaccagtcaagttacaaatatagaatactctctcaattccactttagttagtcatggagggacagtgtgagttttataaacttataaggaatatacaaacagttccaaatttaaaataacttgaagtaacttttaagtgtgtgaaaagaatatttttttccaccctgtccatttaagcatctgtgacaggcagtattaagtgatgggtgtctttacgtacacatgcctgttgctcacagtactggggaagagttgcaaaatagtcacccattctgcagtgatttctctcttcttatttgtgaaagactcaaaaaaaaaaaaaaaaaaaaaaaaaaaaaaaacaacaacaaaaaaaaggccaggcacggtggctcagacctataatcccagcaccttgggaggccaagtcaggtggatcacaaggtcaggagagcgagaccatcctggctaacacggtgaaaccaaccccgtctctactaaaaatacaaaaaattagctgggcgtggtggtgggcgcctataatcccagctactcgggaagctgaggcaggagaattgcttgaacccgggaggtggaggttgcagtgagccgaaattgtgccattgcactctagcctgggcgccagagcaagactctgactcaaagaaaaaaaaaataggggggatgtgggttgtgagagcgacactgtgtgtccatgcgtgaagaaacccggctcatgatgacctcgccccagaacgccgaagcagggccggtccagcctggatttcacagtgttcttcattgcctttgtccttgattttttgtcgttaccattataacttatctctctttcccaaatgtataagtaggctttgaatatgagtttaaaagaaagaattcggggatgatttcagagtacactagaatattttttaaaagaatattttataaaaatacagtgatagtaaaagaagtagaaggccaaattccgcccccagccccttcttaatattggactttattcctttgcttttttcccttgctgccatctaaggaggctttctgtgctatagcatccagttcctctgccaggcatttctgtaaagatgaggcaccttccactgttttattctccatcattagagcacgtgtcctgctgactcggagcagaggggaggcacacgggggtgaacattccctgacagattggatgtctcttaactcttttttcctggtatcaaagaatggcacaatttagttgatttgatagcgttaccaaatcgtttttcctttagaatgaatctagaatgcagatagattctgaggtccagatgggcctctctccaccaacctgtgaccagtgtacctgtgattttatcactgcacattcatagaaaggttacagggctaatcttcccgtgatatgaatcatgaaagtcaaaatttatgaatgaaaataaaaaggaatgaagtactgatatatgccacaccagagataaatattgaaaacattacctatgctaagtaaaagaagccagtcacaaaagacactacctattgtctgattccattcatgtaaaatatccagaataggcaaatctatagcgacgaaaagtgtaatagtgattgcctgggaaaggggcgtgggaagcatggctaacgggtattgggtttttctttggggtgatgaaaatattgttaagattaattgtggtggtgtttgtacaactctctaaatatactaaaagctaccaaattgtacactctaaatgggtgagttatagggtatgtgaattagatctcaataaagctattgtaaaaaatgtgtgaaggaaggggaagcatcctataacctataccatcccaacagcccagctagaggacgattcctgagcctccttctcagcctttgtgttaattctttgcattgatgacttctctctctttacccttactaattagctctcaaaacctctatttaataatgatgctatttataactttcctccttctggtttcttgcttgccctttttgtggtgtttgcttgtttttcttttttctcaatactctgcccagcgttgcgtgttggttccggagacttaagtgatccagtgggcactgtcaggcaattatttcttttgctcattaattaagtgttcacagatacattcagcagccaaaccttgtggcatgccttctgtcccagacagtgagaatctacttggaacttggatatttctgtgagccttgattatatacaccaccaaggggatggcatagaactaagttttttcttcttctccacaacagactttgttctttaatttcacaagcttgacatagcctataagacatcatagtggtaccatagacagttttcccttgatgcccatgggggatttgttctgggacctcccacagataccaaaatccacaggtttatcagcaagggtcactgctcaattgcaacaactgaagcagaagctcctctcatcagaggcagttactgcagcatgttctgtagggcaaatataaccatatgtaagtgactgtgctatcaggagacagaacaacaagacccagaaagactcagtgacccacagagccagttccacccaaacaagtcttagtaatgagattagataatgagagtgtattttcttcatcaattcatgtagctcagcaaggctggaaactgcttgcacacttctgcagagaaaaaaaaaagttccatttgctggaactcaataaataaagaaggccttagtgggtacgtgttatctccttagcatcacctggatgcctgacccttttccagagtgtcatgttgcctgggttttgtccttcagtctaagtgatacacctcttagtgtggcggagaaaagggtgctgtatttcttcctgatggatacatgcttaaatggaaaagtagcatgagatgaactcccatagccccttccttttattatttttaaaatattcattcatttatttatttatttttgagatggagtctcactctgtcacccaggctggagcgcagtggcgcgatctcagctcactgcaacctccgcctcccgggttcaagcaattctcctgcctcggcctcccgagtagctaggactacaggtgtgcccaccaccacacctagctaatttttgtatttttagtagagatcggctttcaccatgttgaccaggctggtcttgaactcttgacctcaggtgatccacccgtctcggccttccaaagtgctgggattacaggcgtgagccactgtgcctggccggcccttccttttagacaatagaaacatgctgcaaccacataccaccataaacacggtgggggaagaggctgcaatcaacagtcaggaggatctgggttccaagcccaggtttgcagtgtaacagctgtgtgctcttggtgtgaacatttggtcatgtacaaatgaggataatgatactgcccccttgtgatcattagggggattaaattaaatgcagaaatatatgtgagatgcttaatgtgttgtaaggcgcatggaatatatttagtgaatattaactgtatattaatacaaagtcctgtattcagaatctccagtataaattacatttatatagtagagatatgaatagtttttgtgaacaagaagacctggaacttcaggtgactagaagctcagagtgagccagctatgtttgatgatagttattcttaagatcacacagagaaacggcaagcaagctgctttgggcaaaaaagagcatttctacactgttcagactgcctctgtactgttagaataggtctagggcgtgttgcgtgagtggtgactgagtaagatgttcagagggaagccgtgaccgtcatcttggaatattgtttgaaagtctgacctgtacaaagcagcactcacttcccctgcgtgtcagacacctgcatgagggctggggagggtccagtacaggaaagcgcatttttaatatgtgtatggaggaagttcgtcaagatgggtgccatctggcagtggagtagcacttcctggaaagtaatgagctcccttggactttgtttgaagagtcacccaggtttttgtaaagaagtgtttcagatcagtatgcaatggatgactgtaaatttctcttcagatctaagaatctgtgattggatgaaagggagaaaggactgcataagtgcttgttgcttgtaaactgggccaggtggatgtcatggccctaggagcttcttgcctgcctttgcatgccataaagcagtcctgcaacccagtgtcacctcagagggatgggaatgtagaagaagagagtgaatagggacagtgatgaggggtgaaaatatgtaactccttgccccttctgtataccctagtacattaggaagttcacccttgtctaggcttcctgttaggaagacagcagactcaaaatggagtctcaacccctttcaaagactgcaagatctccttgtacacactggacttgggagaaaatgagagctttcaggcctgctatcttaacaggttcagaaaggtgtggtccagccccctgactaaccagccctgctgtgcacactgagaattctgctcaggtgtacctttctgtgtgctcctgggtgcacccccaaagtgctggttctcttgaaaacctttttatttaggttcagacagacaaactgtggtatcttccattctgaccataaagtgtttcttctgggtctaactactatagtgggatattttctctagaacaagaggttgtttctttttggcattgagaaatgttgccgatgtgattttcttttgtgaacgtttaagacacagcgcttgccacttgaactttcttttgccgtgcgtagctgattccacataatggctgcagctccaggcagaaacctgtttggaagttgttttaaactcttcctggaatctctaggcagtggctcagtggggtttttttccaaccattccttaggatgaccagaagcttgacagaatcctcttgtcttcattttgagaaaatatgtctttactgtgtgtatgtgcagcatttggttttacctcgtgggtctaagcattttcaactaagcttccttttccaacctagcagacttgtttaaagaacttcaaactaatagccaagctgtaatacggtggctctctcagcctgagaagcctgtgctcaccgtcactctcttcttccctggggtgatagggatggggagtagtgtgtgtgagaggacagaagcgaggattgattgaagattattttacgaggcgagagcatggtggcacacctgtcagctgagtggactcagcgcctgccccggctaggctgtcctcctcctgtgccagccgtgggttccctgagtccctctgcagtcattcatgggtgctgaaaataaagataccctttctgtcgaaagtgttcgccgggctgcctctgcctccctggaaaagcagcagggcacacaggcttcctaggcagcccctgagggaggggctctttttattgtcactctggttagtttgaagaccagacagaaggcagcaaaaaccaaccctttgttgaaaactctttgcctttaggcccttggtaccatgttcatgaggctccagataattccacaaatacattattattgttacctagacttggggacagagaagggtgaaacatgggtctgggaattcacagatgaatatactgtaatcccctcgagcacatttcttttaaaggaatgggggtattctaaaggagtgaacactccactggggggctgctaggcccctgtgaacggtggcagccttggccacggtgtgtgctgtgatctctcctgggtcccccgggcatcctcagacctcccccacacccaacccacagtcccttctccatccatctgctgaccacaccccaggatgtttccagctcagatcacgcctgattgcatccacacaaactgcacgccaggcatttccgtttggatgtgtacacaaaaacaacacgtcccagactgagctgatctttctgtacccctcaaaagaaaagttctgtacccggccaggcctggtggctcacacctgtaatcccagcactttgggaggccaaggcaggaggatcacgaggtcaggagattgagaccatcctgggtaacacggtgaaaccctgtctctgctaaaaatacaaaaaattagctgggcatggtggcgggcgcctgtagtcccagctacaggagaatggcaagaatccggaaggcaaagctggagcttgcagtgagctgagattgagccactgcactccagcctggtgacagagtgacactccgtctcaaaaaaaaaaaaaaaaaaaaagaaattctgtacccttccagatggtcctggacatatcttgaatctaccctgcttttcctcatctgcactgctgtcctcttgatctgggctactgaggctagaatgcacatctgatcatgtgcctcctgcttaaaatagtatttttcctcttaagagtagtccaaactcctattgctggattaaaaggctgttccaggctctccctacctcagggcacaccatctttcctcccagtctcccctcccctctgtctccagtgcttccatccttcagtcatgctgaggttgtctttgttacctttgcttctcttggcccgcactctctgttggctctgccagcatccctatgcacctgctagctcctactcacttgtccagctttggcctggaagtcccttcccctggcaggcagccctaagctaccctttgcttgctactggctcatattctcactgcttgtcctcaggctgtgagccctgggagggctgggctgagtccccgaacctgccacgtctatagggtgtaacctacctgaggcctgactgctaaaatcaaaagaagcctttctcatttgcttagctgagctaagtcctttctggagaagaatgcccacgtcctgggtggacttctgttcggcctggggcaggacgctgcatgtcagttcacctagagcccctcgcttgccctcacccctctccctttccttctcctccccgtgttgtctcatggtcagttcctctcctggcaaggcaagagaatcataaaatctctttggaccatgtgtctctctgatgcactttggaggttgaagctcactttcgtgaagttaggagcggttaatcctcctgcacgaggatgcatgcctgctagggaaagcctccctgcgtttatatggaacagtggtgtgtaccttagggcaacccagaaacagctgagatggccctaaactcttccgtattttgattcagaagctttaccttatttgaacatctgcagaataagttctttcctttagaaatgattggggataaaattgtttgcattatgaaatattgtatggccaggtggcccctctttcatgttttgttccttgtgaagaggttgagtctcctattttttttttttttttggagatagagttttgttcttgtccctcaggctggagtaaaatggtgcaatcttggctcactgcaacctccgcctcctgggttcaaacgattctcctgcctcagcctcccaagtagctgggatcacaggcacgtgccaccacacctggctaatttttgtatttttagtaagagatggggtttcgccatgttgggcaggctggtcttgaactcctgacctcagttgatctgcccgcctcggcctcccaaagtgctgggatcacaggcgtgagccaccacgcccagcctatggtatgcttttaaaaatggtttctctgcactaatgattatttaaaaaaaaaactctggcaagaacaaaaacaaatggttttttaaaaactctagaaataatttgatacattcgaggactctggagagggagagagttaaaggctgatgtgtgtgactctttttcctctccccccaaggaaaaaaaatgaagagaaggagcttttaagtgcagtgcctcgtttttatgtgattgcaaacctgaaccaatccttttagtggtggatgtgggacatgttagcttttccaacagtttagatgggcctttgtttttattgttggtcactgtaagaattccaaggaatagaaggatctcatgggcaaaatcagtttgcttttttctctgtatatttgttagtttatagcagcttctattttcctcctatttttaaaagctgaaatgcctttaatcgcactcagtgtgtttattcatggaagccagagaagagggtcccttcctttcccccatagcgccgtaattggaaatttggtagtactaggtgaaattctcagttttggcgctcgcatggaacagccatccatctgctggcgagacacactgcccggggcttttcaagaaatcccttaatggtcctgaacactaataatatttatatacattgagatgagacaaaatttacagcgggctctggggctggctccaggactctctaatcccacacttgctcacgttctcttgcttgcctcctagaatcctttcaggttgtgcttcagtgaggggagcatggtgtccgtctctgcagcaatgcttatttatgcagttcgtcctctaacaaacagagcaactttccttttgaccttcccctcttctccccatcacattccattgctgcccccgcatagagcatgtgcttatgcatagtttgcatcatttaacacgaaggaaccccttgatttgtgatccctttaagaagttgctctgtatataaagaaaatgatttttcctggttggttttactgaagttccttcagaaatagctcccaccaccgaaacacacctgacttccccagcctgtgtatcggttgtggcacggactgactgactggatggtataatttcactcactcctttgggaagtttcgggggactactgctcagatgtgtgggaaatgcggaatatatctacaggtactttgtcagtttttttttttcttttctttctcatcctggaaaatcccggcattgatatttaggtataactatttgcaagcaagtgcagagggacatttttctgttcttttcaacgttcttattactactgcattaatagctacttgatcttaatgtctattacacatcattttatataatgttttctttaaattgtcagggaaagggattctgcaagtagatgttggtccccccagttagtgtctgatgatgatggtaagattctcagagtttccttcctctaatgacaaagcatggtgatggtgatgtctgaagagcagcctcggtgctccaagatgggtgtatgcttaatactgctggcacacgcctgacgagcgggaatgtgagcgttgtttctgtaaccagttttactgaacctcacagatccattatacgacgtgaattttgtgggaataacataggctgggagtctgctctcttccagcctggtccctctcttctttcagccctaccctctctgatcatcatgtcccttgcactgcggccaggtaacctttctgatacgaaggtctgggcatgttgttcccttgcctaaaactttccatggtttcgtattatccacagttgggctaaaccctctgggacaggccttcagtgcctccccgggcagtggtccctggccttcttcagtaacacccaagcccttgcacccacagtgacctcgttgcttttacaagcatttacatgtgatgttctttattcctcccttgctcatctttccactttcaactccacaaaaccgtcctcggcacccagaagcccaggaaacaccaggcagctccactcactcccgtacttgctgtgtcgtccgttccctggggacaggattgtcgctgatcctgcgtgcatctgtctggcacacaggtgcagcacacattaaatagctgctaaatgaataaatgaagaatagatggaattatattctgttgtgaccagtttaaaaacatgaaattggaatacccaattgcagtgtttctttagatcttggaccttgaggtgacctctgtaatggatatatttgaaattattaactgtcttcaagtgggggtttgatgagagagagagagagtgtgtgtgtgtgtgtgtgtgtgtgtgtttacagaaaatatgctaggtttgtacattcaaatttgtgttatcctcttcaagaaagtcaccttggtagacagcatatatatcccaacattttaggaactcataaaatgcatacttttttggtgtgatcagagatgggtaactccttattacttgtgggttagattagtttttggaaatagcctggagtcattgagagccaatccttatcaacaaaatggcataaatggacaggaatgggtttcttcttcactttagagatagctctgaagacatgtctcagttgggattagttcagttgcatatatgaatagcagtcattgaaacaagataaaagtgtatgtctctcacatctaaagaagtctggagtaagcagtccagggttagcctagcggccccactctcataagggactaagttccttttatctcgcttcaccattcttgatgtttcgccttgtggtccaaggttggtacttgagctccaagcattactactgcattccagccagcaaggaggaggatggccatgccctctttgttctcaggagtcttccaggaagttccagtcacaacgtttgtttatatctcactggccagaacttaagtcatatggccacctctagctacaaggaaggctgggagatgtagtctgtaactggatggccatattatcaactaaaaattactgaaaatgacaagaagaataaataatggaaggcaacctgttgtttctgtcaaaggatgacttcaaaagagaaagttgcaaaagtatttcaagcttgacagtatcatgacagttttcttcagaggtgacgctattcatttgcatgtccaagttctgatatctgttttcaagttcacctatttgcagcgaaataggaactcttggaggcaactagtgggtgtgtaaaccggtacaaactttctagaggacagtttaacccaacaagatgaattctggaaattgatcctaatgaaatgttaagggtgctcatgaagattgctttgccgattgcaataataaaaagtaaagaaaatatcttataattggggacaggtgtaacttatgatacattccacaatggagtgtaatactgctgttaaatgtttgtggaattcacaatcttttatgccaaaagaaagctttcagaatggcttgtcttttttgtagatacttgtatttatatgtccatgcacatacataagaaaggaccagggaaggtctgcttgaagatattaataaaggggtcacttgtgggtaggtggacttacttgttctctatattctctttacttgtttgtgatctctggtttttttaatcatgtatttttattacaagaaaaaacaaattctagaatctccactcaatattgcatgtcagagtcaaaaagatacacatttaaataattttgtattgttttccaatttgaggataaagtaggaaatgtataatgcaaaccagatttcatattttgttgatttagacttaatttacaagtaaggctgacagcccacagagtgtgatcacgacagcattgttatggaaataaatgccagctcatgcatttgggatgtacaccatggatctgtggttattagatactgatttcactttagcacacgaagaggcttagcggaggtggcttctaatatcctatggttctgtgggctcggagatgctactcacccacttgtcagaggcattgaaaccagagcaactgcatcttgaataggagctaggtaaaatgaggccgaattcccagacagttaagacattctgagtcacaggatgaggttaaaggtcagcacaaaatacaggtcataaagaccttgctgatctagcagatgcagttaaagaagccggcgcaaacccaccaaaaccaagatggtaacgagagtgacctgtgatcgtcctcactgctgcactcccaccagcgccatgagtgtttacatgtcatagcaacatcaggaagttaccctatatggtctaaaatggagaggtatgaataatccaccccttgtttagcgtgtcataaaaatgggcaaccagcagccttccaggctgctctgtgtatggagtagccattcttctgttcctttactttcctaatcagcttgctttcagtttacagactcaccctgaattattcttgcgtaagatctaagaaccctctcttggggtctggatcaggactcctttcctgtaacacacctatgttcttggacttaagaatgaccctcagacatggtgacttctttgtcatctaacagctttggcttatttgaggtaaaacctttgatatctaaggcagcagaaatttccctgaagtcattttgaatggtatcatctttactatagtgtagtttaatcattttcaaagtaagcatttctgcacactaaggctttaaaagagttttcagtaaggaacatatttgaaatggaaagtgagcagagcacaatgccttttaaattactgataaaccatagagttcctgtagggcttccactggctgacccacgcctgaggcaaccctcaaatgtgggtattatccccctcattttacagatgggaagagagaggatcaagatcacagaagctaatggtttgtcccagaccaaacaaggagttcctaggagagactgaactttaaagatatcgactctctgcaggtctaagtggatgaaaggacagtggtgggggtgaggatttcgtagtgtgtttttgcattgtctcctcaatgagtgatctggtgctggtggtagcagtgaatgacccagaaggatgctggccaggcccagagaaggcggtgcctcccctgcccggtctcatctccgtctctcctctctctccacagtgtgcccaagcacgtgtgggaagcgggcgtgcaccgagaacaatgagtgctgccaccccgagtgcctgggcagctgcagcgcgcctgacaacgacacggcctgtgtagcttgccgccactactactatgccggtgtctgtgtgcctgcctgcccgcccaacacctacaggtttgagggctggcgctgtgtggaccgtgacttctgcgccaacatcctcagcgccgagagcagcgactccgaggggtttgtgatccacgacggcgagtgcatgcaggagtgcccctcgggcttcatccgcaacggcagccagaggtcagtcgcggccacacgtgtggtcactacccgccccacctcacccgccaccctagcacacaaaggtagactctgtcggttgtttcatccgggtgcagccctcaggaagttcactgaggtgggtcattttgagagggctggcttaccttaaatgtttggtgagattctaggaacaattggcatggcttaccgcccccctcaccagtttgttttatattttaagtgcatactgcctggccatttgaaattaagtacttgcttgctggtttcgatacccagagttcatagtctctctgggtacttgccaagctgccatctaagagacagggaactgtagttttggattttcctagtctgggtgctgctagccaggtgaggctttggaagtgcaaaagaaaagacatgctaagcccccaccaccatccttgagaccagcaagcggacctaaacatcttagtgcaagagctagcagcagctcagagtaggcagtagcttaaaataagggacatttttccatcagcacttccttcctctcatccccctctaccttgaccctccctcagtgctcatcatgtccttcattttccttcctgaactttgagacttcacttgggaagcaaagaagttccttatggccaggcatgtggctcacacctgtaatcccaatactttgggaggctgaggtgcttggatcacttgaggtcagagtttgagaccagcctggccaacgtgatgaaaccctgtctctactaaaaatacaaaaattagcacctgtagtcctagctactccgaggcaggagaattgcttgaacctgggaggcagaggttgcagtgagccaagatcacactacttcattccatcctgggagacagagtctcactctgtctccaaaaaaaaaaaaaaaaaagagaagttcgttataacaaatgccatatgcccttttgtacatgtcaactggacttctataaatttgtcattggtttatgcttttgaaaataagatgttagcattgtttaaaaatgtgataactataactttgaaagcaaaagaagattggagatttggggttgctgttccctttcctggagcagagtaaagaacttttaggggctcacgcctgtaatcccaacactttgggaggccaaggtgggcagatcccttgaggccatgggttcaagaccagcctgggcaacatgcaaaccccatctgtacaaaagattaaaaaaaaattagtttggcttggtggcacacacctgtagtctcagctccttgggagttgcaagtgggaggatcacctgagcccttgaggtcaaggccgaaataagccaaaatcgcctcactgcactccagcacaggcaacagagaccctgtctcaaaaaaaagaacttttaggaaagttctgttttagtggactaaatgcctccttcatgattagcaccagggggcctgtctttctgagtctgtcaaaatctattctacaaatataaaaatatcgttagaaaagtaggtgttaattttaaatataatttttgctgcagcttatgaagtacattgaggaagtgtttataaaggggattctttttctagtgtattatttggagacgcagcttctactgtaggcttaccttcaaatcaaagataatacattcttttatagtattagatgtagagcaactttctccctcttataatctgtataaccattagcatactaacaacaagaagaaaattactctgaatactttaaaatgataaataggccaaggacttcaatgagctgtagaggatacatattacatccaaaatcagtctaccacattgtactcacattttgttggcagccttcgagtgtaaaagggcttttactggtgcacacctcgggcccaggggcagtgcctggaaccaagttgaggctcagacactattcagacgtcaccttcctccttggggtggggttaggggagtggtagcttgtccatgaactcagtgtgctatcgtctttgttttgtgaatacattttcttaatgacatttggaggccttcagtcgttctgcagccaccagagttgtggcaaagtgggaatgctgtccatttgacagtgttgtttcttccgctctagtgcactcttcagagaattgagccattatttcccctattcattcttacagtccgttaaaaactatacatctacctttttgtttaaaaataaaacaccataaagaataataaattcccttctctcagcctttgaggcttatttaacaattactttgaaatatttaattttttcatcttgtttataccttctctataccatagtggatttgaggaagcttaatctataaacatgttatcaaaacacttccttagaaaaacattttttaagtgcttgatgactcctagactttttaccaaagatgattggttccattttttttttcttttcttttctctttgatagactctggctgtgtcacccaggctggagtgcagtggcacaatcatagctcactgcagcctcaaactcctgggctcaagtgatcctcctgcctcagcctcccaaagtgctgggattacagatgtgagccactgtacccagcttcagatttttctatttgagtgaaagatggagagaaactaaacatacacttatggtacaacccagcagttgtaaccctggatatttatcacagagaaatgaaatttatgtcaacacaaaaatatgtacaccatcgtccatagcagctttatttgtaataaccccaaattggaaattactcagatgtcctatgatagatagttagttaaactgtgggacatccacaccatggaatattattactcagcaataaaaaggaacaaaccattgaagtacactacttggatggatctcaaggacattatgctctgtgaaaaagccaacctcaaaagatcacatactgtataattccatttatgcaacatcctcaaaatgacagattatagccaggcacggcggctcacgcctgtgatcccagcaatttgggaggctgaggtgggtggatcacctgaggtcaagagtttgagaccagcctggccaacatggtgaaaccgtgtctctactaaaattacaaagtttggccagtcacagtggctcatacctatctcagcaccttgggaggctgaggcaggcagattgcttgaggtcaggaggccaacatggtgaaaccccatctctactaaaaatacaaaaattagccgggcctggtgatgggtgcctgtatttccagctactcaggaggctgaggcaggagaatcacttgaacccaggaggtggaggttgcagtgagctgagatcatgccgctgcactgtagcctgggcgacagagtgagaccctgtctcaaaaaaaaaaaaaaagacagattgtagacatggaaaacagattagtggttgccaggtgttagggacattggggactaggttgggcagggcagtgagtatgaacaggtggcattagggagagcttggtggtgacggaacagttctgtatcttgattgtagttgtgattacacaaatctacacaagtgatcagtgacacagcaccacacacacacacacacacacacacacacacacacacacacacacagagttaatttccaggtttgatacttatatcatgtaagatgtagtaaacattggaggaagttggatgaaggctatgtgggatctctctgtaactttctcgtaaatctttgcagctttttgtgactctataattattttaaaataaaatttttttttttaaatggaaagtttatagggtatgtagataaattagaaacaacagaaggccaagtaaaaaagtgctgaaggaagcctctacccaggctggaaatgagaatgttgaatgcaatggtagaggaaggactctccccatctgtgggtgggtccagttcctgtaggacccttggggaagccatgacccccattctcccaaacacacaataggaaaataccagagaagttttgtttacctgttagcttttaaacaaaacagaaccctgcatctttgtcttagatacaaaataaccttcatgggtagggggaagggacattaataaaaagagctataatttacattgtttttcttgaatgtttttacttcacgaaatttgagagatgatttaagaacaataatgtacatataatggctccccagcttaccatcctattacacacacatcgcataagttcgtattatttgtcttgtttggaaatcagtccaactttctgacccttgttctatatataactatagatcccaaaggttcagctgctgggctagcattttgtctgctatttcctaaataatggtaggtaagcaggaaaagtgccagtcttacttgtccctgactcttggtggttcgtggcatgttcaggatagtatttgaaacaagagctcattacaaagtaatggaaaccccttgcttttattgtgtatgcagcaaaagcaacatttggatcaatttacaagtttctgcaaaacaccgtcaagaaataatttcggttgtgctttagcaagaaaataatggatctgtgctataccacatgccttttggtatccctcactgggctttgccaaaacactgactgcaggagctagactactgttaggcagagacactgcactccctttgctgtccctgccttctctcctagcgactcctccaggtacacaggccagggtcacagtatcagaaagcagctctgttttcctccagaaccccccaagcttcctttctgcagcactgtctctcccacatggaaccagctggctcaccagtcaacagcctatgacacacaaatgccttgaggatgcagcatgtattttgtctggaagcaagcaacacgctcttcctttgtaggctgtttctccttttgcttgcaatgtgagtggcttatcttgggtgggcttgggggtgagataccatgtgaccacatgaacacttcaaaacagttgctttttctaatgcatgctgtaataacaatgaaaagcatatccttatggtttttttaatgcaagaagacagactcaattatgtgtgtttttgattttttttttcttcttcaacagcatgtactgcatcccttgtgaaggtccttgcccgaaggtctgtgaggaagaaaagaaaacaaagaccattgattctgttacttctgctcagatgctccaaggatgcaccatcttcaagggcaatttgctcattaacatccgacgggggagtaagtattccatccccctggaaaaacggctagatctcatggttttcttttgttgatgcttttcatgctcccgtccctgagtcaccactaaaatatgggcttagataaacaacatggtgtgtaagcctcacgcatgacgtctcttctttgagtttccctgaaagataaagaacagattgaaaggcaatctgtcttttagccattggcacgtcatttattcctgtaaagagggtcatcgctcatctttttgttagtcacatcttgcataggagaggcaagccctgacacatacaaaccccagaagagaccattggatcagacgtgtgactcagcagactccagctgtagccaaatccacacatctttcaagtctaaagagttttggttacttgaatttactgagaagactgagcaaagggaagtttagtgatatcacgttaaaattttatgaagtccaaaagaatgctagatttccaaatttacttgtgagagacaaaaggatacaagtgtgtgtcattgtgtacataaagtttcggtctcacccctgtacaatgacctttatttgcaatagatggcattcctggtaagttgcttctgagttggatttgtgcaaaggatttcccactgacttagcctatgatctcttcacttctttggttttttgtgtgtttgttttttggttttgttttgagacagggtctcactgtatcacccaggctggagtgcaatggcataatcatagctcactgtaacctggaactcctagtctcaaacaatccttctgctcagcctcccacgttgctgggaccacaggcacacactaccatgtctggataattttaaaaatcttttcacttctgatttttcattgccaagggcttctagtaatggtgccttaaattctctgccactgggaccacttggtcaaggtactgatagttttataagctagaataaatatcgtaaaatggctttgaagttgaaaggaattttggggggggaatccttttatgaagaatttttttttttttttacagtttgagaggaaaaataatgtattttgagaatgtgttttccttaatatttgttaaatgagtagactgtattcttaaggtttagaaaggacagaaacaagtttgtgcttagttcttctgaattagttgatatcccttgttgctgttcacaatacacccactcccagccctccgtgatggagataactctgttccccacaactagggcttgcccactctcatggtacttctgatgtttaattcttttggctgtgtctgcatttcctcatttacttttaatttgcttatccctagaacataccttttgagtgcctaaacttttttatcttcctgtcctgaagacaaaaatttaatctgtgaattaaacccatggagaagtatcatttatgaagggattggtacatattgatgcatgatgatgaaatgtgtcttctggtttatgtccattgcaggaaatagattggatttaggatgatgggacatctcattagaggggaaatttcctgatcttgactaaggcatgcttcctgccccacgtttaaaattcaggatctcttccttaaaacatcaactgcacgcaacctctcatctttccaacttgaacttccctttaatttttcttggaaagctattaaattaaattagatgtagggctttatcctttagtacccttattattttatttgtatcaactcaaagcaaaatagagcattttattaaatatgtcttcataaattacgcacagtaaaatcccattaattggaccacacccagttcattatagtgtttattataattttagcattagttgaactgaaaattggtttttgtttactatgagaaaaaggtagactaaacaagatgaaacctgttgtttgcatattatgtttgtacatctttattagcaactatttttccaactattttcaactatttttccaactattttctagttataaaagcaatacataaatactatagaaaatttagcaatgcagaaatgaatttttaaaaatccctcatagatagccattgttaacattttggtgtattttcttcaagtcttagtaaaatggaacctttaaatatagatccctgtatcttaggaattagaaaggcagcaaaggcagttcctaatgagatggagaaaatgttgatttagtcatgcccttgtactgtgggggccatactgtctgttgacagagcatattaaaagacgttccctacattcgtcagccttagctaattggcagtctggtatttatgattttatattttgttaatcagcttgggagctgcagtaccccccagcctcctagaaacttggcttcccctgcctgggaggcctcgttccaggagtcgttgttgagagtcaagccagggaagtgtgtttttgtcagggagcagccagtcctgtgctgggagcatctcagggggcacctgccgttgaattgttctcacttgtgtttgtaagaatccaagtatgtcacccttacaccaagtgagcacacagtgacacaatcccctttcaatgtagataacattgcttcagagctggagaacttcatggggctcatcgaggtggtgacgggctacgtgaagatccgccattctcatgccttggtctccttgtccttcctaaaaaaccttcgcctcatcctaggagaggagcagctagaagggtaagtgccccaaatttcatgagctgacgttctattacaaaataagcagcgtgcttatgaaactgtgttgctgaggtaagagccctccctgccttgttaaagagaagaaaggaggaagccgcagtattgcctgtgctgctcgagtaggtcttgggtggagtcatggttctccattcttaggaggttgctgtttggaaaacagagatgttatcacccttactggattttgcctcatcagtcaagggttgcgtgtctgactgtgaccagtgagacggcagacgggggtgcgcttagggcttttctgccaagaatgacagcagttggtctggagtgctcacctccctgtgaaatcattgttcgcgcgaccctcatctgcctcaggatgctgtactctactacgcacaactgctccatcttttaagatattggaagtgagagcacgggaggagcatgggcggttcgttttgttagaaagaaacccggattcacgagatggtttttattgattagtttacaggatttgcactattgatagagtttttgccttggcacaggcctgctttgtgataggggttttaaaataaccgtgggcttttcactggaggataaaagccggtgcttattgcatgcacaattgctttccagccgtcagcctgtgtgtacctttgcatatgtacttttctctttaaactctcccttttaaatacgactcttgccaggctttaagtgaatgcttcaaaataaaaggagttatcaattaaagagtgaattccttccaaagagaatttgggaaaataatttaggaaaagaagaggcgagaaggtcatgggaaaggttgtctttgctgatttatctgccccaactggataaagttactgcataagggtttctttacagcctccctgtttttctcagactaactcttggtcagtcttaaattcttaaaattccatcatctgatagagctaacgagagcgggcagctcttcattccatccttgaaaagcacagtgtcctccccactggggaacaccaatccttaaaaaacttctttctcattgcaaatcgaaggaggctgccgctgcacccagccccagactcctcagtcacttacctggcaagctgaggccctaccagtttaaggtgatgattattgtttcttgtattaaattttaaaatgaatttttctccgctttttttttttctaagtaggtttgtgtttctggaatctcgggtgtctgtgagcatttcttcttcagcagagcagtagctgtcaaattttcttgttgcttaatgatatacttttttgtttctagactaagcaaatgatagacatagaggtgaatgctgagaggagagtttaattaatttccattaggaattattatgtggttaccttttcatggagtgttaactaagtattgtgcacttaaatgtagttagaaattaaagcctgatttttatttgcaagaatatttatgatgtctttctcattatctgaaacttgcataaaacctgaagcatcagcaaaatctttttaaggttgcgtgctcaggtgtttgggaggctttccaggtaagcccgggcccctggcctgctcttaccattttagatgcaggggagggcaagtgggccttgggttttccctgctgctgctgctccccagtagtcctgcagctccaaggatgctggctccagcctttcattcctgcgtgcagcttctaagaggctctttcttgagcttgggctcttaagaatcttttacctcccgatgggaagttttctctcaccctgtcttcctggcccatgaccacaaaggtatagcccatcctcacgatgatgagctccccaagagctctgtttgcttcaggtgttgagaccgctagcaacacctcagctgttcatttctccttagactcagggacagagttaggtctggccccttcactagctgccctcacttctgcaagaagggaagagtcagagcgagaaagagaaggacaggatacgatagtcagataaacatcagcagtgcaaagcagaactcgcacagtgatacaagggaaagaaagaaatgtgccctaggcatggagaagagccagatacctgagaagatcagacaggcttctgacaagaggtggcatttgagatgggccttgaaggctttcgggaaaaacttgaggaaagcagaggattgaagtgaagaaaggcaattcaaggtagggtggcaggagcaaaggcaacgagttggggcatcctggggcctgttgggcaactaacactggagaggtgggtggtactagagttatgtaagatgttttgcacgcaggtataaagggttataatttaggaagaccatggaacgtattcaaggcttttgaatagaggagtgttagcagagctgtctgaaatttttatttcggtgtgcttttggtttaagccaagatagctttcatcccagtgtttctcaaactttgctacacattatggaatcattgggggtgggggcaggggtggagttgagaaatcctgatgtccaagttgcacccccaccccaattcaataggagcgtttggggttaggatccaggaatcagtgcttgtctaaagatccctaggcacttcagcaggcagcaaagattggaaaccactgctttatcccttcatttcttcccatgtgcatatcacaaagcactttgacggttttttttcctaaatattttcccctcacactgctgcctaatgttttagaggttcacccatgttgttaacacgtgtcacactattttcttgaacttttttttttttttttttttgagatggaatcttgctgtgtcgcccaggctggagtgtagtggcgctgtctcggctcactgcaccctctgcctcctgggttcaagcgattctcctgcctcagcctcctgaatagctgggattactggcacgcaccaccacgcccggcttatttttgcttttagtagagacggactttcaccgtgttgttcaggctggtctcaaactcctgaccttgtgatccgcccgcctcagcctcccaatgtgctgggattacaggcttgagccaccacgcccggccttcttgaacttcttttatagccagtgataacataaatgtttccatttggttcaataggatgaaagttctgttctgtagccttttgtttttgatggagaacagaacaattcaaggtacagagatccttcaactctgacaaccttggctttccaaaatgtcactgagatccccctcaaaaagtctcctgagccatccagaacagaaaattcaagcattttacatagagtagagctcttattcctcactcagagcctgttgacttttatatcgcactcggcgtgagctgattttgtaacccagttacaaaagccatagccatggtttcctcaaggacaccatagggtgtatttctagagtaatgaccttagacattaagaaaatcaagaccgctctgctgtttacaaaggaaacaggttttgtaatccacatgtacacaatttttataaaatagctaatttttaagctcttgagtaagagaatattttcactatctggaaaatccccttgtttggacaaccttgtttcctgatggcatcagataaataaggagttaaagtttcacattatttggtgctaccaaggattgttgccttgaaaagaagaaggaaaaagtagatggagggtggtgagttaaaagaattgaaattcgcggataggcatttctatgcttttgttcctaccactcgactgtgcaacacgcagtgctttgtaataccttcttggagctcaaaggtcaggctgaaacatggccgctttttcacatttccctgggacttttggaaaatatacaccaaccctgtgacctagcaattccgggatccacccaagagaaatgaaaacatgcccacacaagacttgtgtatgaatgctggtagcagtattactcataatagcctcccgggattcccccgacccccagcccaaaagaaagacccactggaaaccattcagatgttcatcagcagatgagtggatagaaagataaatggataaatgaaatgtggcacaaaggacaactgactactcaacaataaaaagacgtgaagtatgacacgtgttacaacatgggtgaacctctaaaacattaggctaagtgaaaagaaaaaatccagacacaaaagactacatattatatgactcattcgtatgtaatttgcagaaaaggcaaaactatagagacagaaagcagaccagggatggctgcaaggaagaggtggagattgaccaccaatgggaatgagggaactcttggatgatggaagtgttctggaactgagtagtggtgatggttggacagttgtgtaaatttacggaagctcatggaatgatgggtgaatttttttttttttttttttttgagatggagtctcactctgtcacccaggctgcagtgcagtggcgctgtctcggatcactgcaagctccgcctccgggttcacaccattcccctgcctcagcctcccgagtagccgggactacaggcgctcaccaccacgcccgactaatttttttgtatttttagtagagacggggtttcaccatgttagccagtatggtctcgatcatctgacctcgtgatctgcctgcctcggcctctgaaagtgctgggattacaggtgtgagccaccgtgcctggcctgatgggtgaatatttgataggcaggttatacttcagaagtaaagctatttttaagaaacacctaaacaaagaggaaacattgtctgaatatctgtatggtgcctggttccacctagatagacatatccacccttgctgaacccctaaggttgatgtaaatattggatttgggggagagtggacatgatataaaccagcctgtttgcagatggattggtgggagcatctgcagaaaggcaaaaaaggccaaatactcttatcagttgcagatggctctgttgctgatgacagcctgtgtcctgggttctgatgccccctagagacagccgtgaagaggcaattttctcctcgaaggaaggaactggaatgattggttgtataattgcagaattgttttcagtatgtcagcaagcactgaaaatggggaaactgtcccttcctacctctgtaggctggagacctcgggttcagctccatttatcagggcacaggaccttcctgttctgagactttgttccaggggactttcacacttcagagaatagcacatgtcatcctgcacttttgtggggtgattaaaagctcacggtatccttttatgtttagcccatccaattcttccaactggcctcagccagaaaagcagggaaggcacccccagtttgcagctgagagactccagcctgggagagctgaataaatcttttgcccagaggggttcctcagtaaatgctggagatgaggctcagacctgacctttggattcccagatggagtgctctgaaccgtgtacctggggctgtcttcaccactcaaatatcgatagagataacatagagatgtcctcaggaagataaccaactgttcccatcctgtgtggtctacagattgggagatagggcctacccaagtgtagaaataaacattttttacaacatagagaaggctgagaaccaggataccaatatcaataaaatctggatatcatagagcacatggaagctaaagaaaaataagtaactggtcaggtgtggtggctcacacctgtaatcccagcactttggaagaccatggcaaggcattgcttgagcccaggagtttgagaccagccagggcaacatagtgagataccagctgttaaaaaaaaaaaagaaaagaaaaattaaccaagcatggtggggcatacctatggtcccagctacttgggaggctgaggtaggagggtagcttgagcctgggaagttgaggctgcagtgctctgtcattgcaccactgcaccccaacctggattacagagtgagaccctgtctcaaggggaaaaaaaaaaaaaaacctaatttttaaaagcattctttgaatgtaaaggcagtaagctaagaaacaattaggaaatcacatttactgaataatttacttaagtaatctttttcttcaggaaacaatgataactttagcgtatgcatattttaaagatgtgcagacaggtctctgccttttaccttctcttaattctcacctaatcatggaaggaatttagcggggagccttgccccaagctgtggctcgaaaaacaagcatggtattgacaggcagctcatgaatggcttgattattattttgacaagggttttatttttatttttctttagcttccacaggctccataatgcctgggttttattgatattggtatcctggctcccagcctcttcaatgattgtaaaaaatgtttgtgtttactgtaaaaagataatcttgcttttcaaagtgattagtcaaatacacagaatttcagtgtgcctgccattcatttgtcaaattcctggtttataattcatgcttcctcccgtgggggagaagaatgttttgttcagaaggtatttttggtgtggttccgttccctgctagtgaaattagtttatgaaaagaggcctggttctgggtgtagatggaagtttggcctgattaattggtccttaccggcagcccagaggtttcttcatcaacaaggagattttgtcctgtaactaactcaggtacctggaagcagcccgacatttgggggtgcatcgctgcagtctcctttggagctggagaaacctatgagcaagaatgggcttatgacacatccatttccactccatccctccttccgttgtatgactgcatggagcccctctgacctccagcagtgtcacctgcagcctggtagtgagaaacagcaggtatggatggggtctacccccagcaacagtagcgccagctgggccatatcctggcactgctccccaggaaacacaccttgtgttgcattgaccagatctgggatcatttggacaatgtcttatgctgcttttccaggatagctgtgtgttcaggagggagcccttactgaaaggaaagaactgttgacttacaagtttttgctaccggtttggtggtcactaatgtgtccagaggcctgaagatgggcgtgtgaggagcctgacttagcttcagaggctctgtctttcgactcacttgtgtgctcactgcacccctgtgctggcaggactccaacctccacccccagcacttgtgtggacagagagcccagtgctcaggaaagggttgggcttcaggcttgtgatgcagattccgtggtggctctgtgactccttctggtcgttcttaaagtagacagggagcttagatgtcacctgtgcattccccttgttgtcctacgagtgagtaaacagggctacagatagcactaagggatctgcgcatggctgtgcagctcattcatggcatttctggtcctgggtcccagtctctgaactccttcctggtctgacgtccctttgtgaatgttcaggaaaatgtcacagggctgcttggcagcattgtaaccataatttgtgctttactgtaaatgagaatcaggctgaggattgaccagctggttagaggtcctggtttgggtgtaaatgaagaccctcaccagatgcagagagatccccaatggacatagcctccagggcagacgaagccttaggggttctgttttgtcctggctacgctggctctgcagggagggctggggttctttctcctttgtgtgtttatacattagatctgtgagtggatcttagaagtcactcaaagtactgcactgattcccaaacttagtaagaagcagagcaggaagaggagaagaaggattcacggtccatggggatcaggcccatcagcacagaggactcagaagtcaaccctggcattgtctgctgccttcctggggaagccagagagaaaggcccactgcggggatctttctctagacctaagccgtagctgtctgctttcttgcctctccagggatggacttgtcctgccacctgggtagccagatagaacggcttcctgtgctggttggatctgctactcgtgtgcacaccctctggggcagaagccacgtctggtttggtgggctttggtcctccaccacctcactggaactcagcctctcctagattgctggttctccacgtgtggtccagggaccacagcaggggtcagcaccacctgggatttgtgataaatgcagattctttgcccaccccagctgaatcagaagctctgggggtggggcccagccctttgcaaacaagctttgtgcacactgaacttggagaaccactgtgttggactccgagtcctcttgcctggatgagaggcccaagagcactgcatgttagtggctcttcctcctcccccacacctccagggactggagctggggctgctcagaatgaaagatgaatgggggagggagaaggcccagggttgaccccccacaagcttgtctccctgtctcatgctgtctcctatcccatcatgctgctgattgggcaggatttacttccatggataatgggagactttagagcaaagtgtacgctgttccgattgggtagcagagcatgtctgttctctcatggactgctttcaagcacgttgtacatacttggctgagaaaaataaccaaaggcatttcttgggaatgattctagtaacatcctctggtacaagaagcattatttgatggtaatagtggtcatagaattaattagcatcttaccgattttgatatgttatccttgaatcatgttgctgccattgttaacagcaactgtctgttctcctatagtgttaataactaaatctcttattggcaaaggaaatgtattgtggagcaggtggcaaagaggacctgtgttacgtggccagcaggctagaggggactgtggccaagggcaggtgcgctaacatcgatttctgtgcttctaggaattactccttctacgtcctcgacaaccagaacttgcagcaactgtgggactgggaccaccgcaacctgaccatcaaagcagggaaaatgtactttgctttcaatcccaaattatgtgtttccgaaatttaccgcatggaggaagtgacggggactaaagggcgccaaagcaaaggggacataaacaccaggaacaacggggagagagcctcctgtgagtgacagcatccaaaacaccgtgggcccaaccatcatgataacagcagaccctcctcccatgtgtgatggcagctttcctctgcggcccctcctggtttcacatgggggaccactagaccatcttaactagcactttgctcctacttatatgtcatcacaatcagtagtgggcagatacgtgatgtattcgtatttataaattctgtacatctctgtgagtgtgtgaaacacttataagtaggttctcaaactttaaagtgctgcttacagaatgcacagttaaatgtccttttatacacaggtgcacagttagatatttctctttcttttttcttttcttttttttctttttttttcttttttttttttttttttgagatggagtctcactctgtcacccaggctggggtgcagtggcatgatcttggctcactgtaacctccacctcggttcaagcggttctcatgcctcagcctcccgagcagctgagattacagacacctgccaccatgcccagctaatttttggatttttagtagagacgggatttcatcatgttggccaggctggcctcaaactcctgacctcaaatgatccacgtgcctcagcctcccaaagtgctgggattacaggcttgagccaccatgccctgtccgattatttttcagggaagagccagtgtgcttcagccctatgagctctacccttctgctcccacagaagggaagcacaggcctgtggggtggagggggctctgccctaagcgcagcccctgtgggccacgggtttcctgtcccttacactcggccgccttgtttctcccaccccaacatgaaaaagatggagtgagcctgcagccctgagttgatattgctttttaaattgagaacaatataattacagccttgtactgtttataaaactttaaggtctcatatcagagatacagcagtgcctttctcatctaaccctgtgtagaatacggctgttgagaatggcgtggctctctggctggatagggttataaaagtaaatcgtcttttcacctttggcttttaataagggaagggtattagaaaaaaagtaatttgtatgatgaagggtgatttgtgcgtgtgtgcagacagacacacatgcagggaggcaaatcagaaccgatgcgtgtttggctttggcttgtttcgctggtgtctggatttacctggcgacacttgttgctctgggggatcttagagggaagcacgctgactgacctagggctgaacagcaggctgacgaccagcgccgcctcccgccccctgctcactctatccctgcaaagcccctgccttgctccctgttcagatcatagtaaaatcggatgtatccgagtatttcagagtgcttgtctccttagagtcagccagtctgacctgtcagatcataatacatagtagccgtttattttcttttgaaagcaaaatcatggtttcctctctaaataacacttcagcaggaactgtgacatttcccaatctcagttgcgcacattttgtcctaaagacttcttagctcttttactgtcttcagtccctctgcttcacctcttgagtgtgtagtgggattcaggcagataagagggcgaaaggacaattcgtcagagagctctgggtctccatgagggtgggcagtcatcagtctttccctggtccttatcgtagtttgaatttggtccaaggaataagagagacacttggcacagcttccctgccatacccgccagccaggctacttcccatagagcacgttaggcttggccaagtgagatcttcttgtcagtgcttaatccagcctcccgttgtttgtcagccctagctggaggcctcacaggagttcctgtgtccttccagtttgataccaagtttagaccaagaaaagttcctttctgtggcacacctgtagtctcttacctgtctttggtggttgtacacgaacaggcagatatccacaactgcagaacaagtgtcatcgtctctcttaagaagtttcagggcagcctaaaggctcaccttcaccctaccaggccccctttcatagccaggatcttagggatggagaagaaagataagttcacctcgttcactgaagtcgccccttgttttcaggttaggaaacccaggttcatgtccaagtccctgggcaagtagccagcgtaactgattgacctaaaacaaaggatggagcccttggagctctgcatagtgaaatgtatgatttcttagtggaaaacgagaaagccactgaggaagcccagaagggaacttagcatatacagccagctttggggaagggggaagcagtgccaagcaagacaggtgcttttcagagacacatgaatctctgtcactcacggatgtactctttgccccaggtgaaagtgacgtcctgcatttcacctccaccaccacgtcgaagaatcgcatcatcataacctggcaccggtaccggccccctgactacagggatctcatcagcttcaccgtttactacaaggaagcgtgagtttctgctttgggtgatgccattctgttgacagggctacgaatgggagaggccagtctttcgatccttgaatgggctggctgaatacagggggtcagcagagtccccagggagagccacgccaaacatccctacttcatcctcatgcaccctctcgggctgtccctgtgatgtcagtcacagccagtgacagccatgattgggaaagtgttagctcgaggcctgtcattctttagtgagtgattagaggtgtttgaataaaataaacccaaaatggggaaagcttgctttttccagaattaggtcagtccagactcatgaacgatgatgggggacttcactgaaatatcgtttcagcctccttacctactaggcctactccaggaacaccctgcaggcacgtggctcttttgtatcatcttattcctgtctctctctctgtgtgcctctcccaagctgtggccctctgctctaggtcatgagccttccaaacaagcgaagaaaagtggagagagaacaaccttcatgtcttgagccttttgtgacttctcctagactctgttgggagcttttcctgtgtgatcacatgacattcccccatctaagcagccgaggcttattcctcccgactgcagccctctttgatctccctcttccttcctttgccttctatatccaggtggctaccccggtctacttagccatcccccttacccaggtcccatgttaatcccatagttctctctcccagatgtgtggcttccaaagagcagcaaccagaggcaccttatgacagcatcttgtactctttcctcctgccagagctggggtcctatgaatgagaaattgggtacttaggattactaggctttcagagtttgtacacaggggagcccctcatgatctcccatcccatgacagcagacggtgttttgttcatgtttgtttcagaagccagcggccagcagctgtccagcccttttagctgataaatataaaatacctacccaaccatgcatctgtgcgaagtactatattctctgatagtcacaccagtgctttggcaatgtcagctggtaatttcactgaggacttgatgctggtttctaaggcaatctggaaactaaatatttgaatattataagatgcttaagcatcagaattgtttatgagcaatctgaattttagaagctacttctgtttgtctgtaggaaagtcatttttctccaacagttaccttctttcaatatctgatatttgcattaactgactatgcttgtttttttcttgatgaaaaaatgctgcaatcagaagagagaaaaatagtttttgcatatgttcttaaggaatagtaactattgaatcccagtaactgttgaagtggctcttcctgaggcagaccattcaattctgtaatgcccgactggggaagcccagagtccagtcacttcatttcttcttctataaaagtctaattgattatttgtttatttagacctcccattatagaaagtgtgacatgctgggcctctggggaagatttttgagggttttgatgtcagagccccgaactttctctgaacttaattgtctttcagaccctttaagaatgtcacagagtatgatgggcaggatgcctgcggctccaacagctggaacatggtggacgtggacctcccgcccaacaaggacgtggagcccggcatcttactacatgggctgaagccctggactcagtacgccgtttacgtcaaggctgtgaccctcaccatggtggagaacgaccatatccgtggggccaagagtgagatcttgtacattcgcaccaatgcttcaggtatccatgcctagacaagcccccagcatccacacttcttcgcaagctcactggccttgcttgtaccaggtgtcattgtagggttagcagtgagctatgcctgttgtctttcttgtcaataggtaatactgtgtcatattcatttccccactgctaacacattaggctcttctgtgccattttctggcctcggtactatcttccatcatctcctgctttgtgcctgtgagcccaggtcctccagggtgctgggctggtttcattggaaggcccagcctggaaacagccgtcttcagctgcccttgtttcttgtttgttttgatgttcaatcctccaggaactgaaaccatgctgatctgtgttccacttaattcatgtagctcactggttttccatcttcattctggagcttatagagttccaaagaggtcaacaaaagttgaaagcctgcagatgtagtatgttgtggatattcagagtattcactgatgatgaggttcctccttcctttatctttaggttctaaaccatctcatttctcaactccagatctggaaacagtaaaagcaaacgttaatagtttccagtatataaaaactagtttagaagtaggaaaatccacttcagttttaaagacactgattgttttagtgtattggagcttctatcacaaaaaaacagtgtagcctgggtggcttataagcaatagaaatgtatttctcacagttccagaagccacaaagtgcaagatcaaggcgctggcagatttggtgtctggtgagggcccactccctggctcatagatggctgtcttttcattgtgtccttgcatggtggcagggatgcgggagcactctccggggcctctcatagaagggcctggattccattcatgagggcttcactcccatgacccaatcacctcccaaaggccatgcctcctaattccatccccttaggggttaggattttgacatgtgagttttggtaggggacacaggcattcactctatagcactgataaacattctttgataatagccattattttagtgggtaaggtgtttttaaatacccataagcgagcacaaaatcagtttaaatggcagagaggagggtgagaagaaaatgctggtggggaaaaccttttgctgtgcacgcctgctccttcctccactcctaccccatctccatgaccctgtaagtggccacagtcatgtcactgggtaaagtgcttattgaaacaaaattggcacaggcttctgatcctgcgtgtgggttggtgtagcagaggttcagtgcaacagaagaagtttttcatcttaaaatttggaagtaacccctggccagcaattcactgtagtgtttgggaaacataggaatatctgcttattgtgacagattctcaagaaacctgtttcctttccacaaagatggaaaccaggcactgtaccaatgagtcagttcactacgttttgtcctctgtccttacacgcagcggagacagacgagaacttggtcctctgcctctgctgtttggtgacacctatcgtaagaatgtatctaggaatgagctgtttgtttttgaagtacttatttttggaaaccctaaagtggctgagcatcaagtggttgtgttttctctgaaaacgccagtattagtcataacctttttccaaagtatcatcccttaaagatgttcagaaccttgtgtgtatcgtataacctggagcaccctcaagctgtccgcccttttcaagttttaaaaatggcttaggcaaacatattgcttaagtgatatccagtgaaggtgtctcctgtgctttgaaaaaccatcaacattgatgcttttttgtgacccaataaggacaagatttcagtggttctgggatgcatttgatctttatgcacacttcagctctgggtttcagttcaggggtcagcataagtaaagcttgatcagataactatgctttgcctataatcggcattcattctgctggtgacagagtcctttgctcaaaatgaggcttccatgcgtttgcagttctaaactgcttttcagagtcatgcctcagtcattgtactgaaggatgcctgtggaaatggtggacttccgtgttctttgcattgcctctcccccatccctcttacacacagctgtgacatgggcatgcacactccttcacacacacagactctccaggcccctttccacttcctctttccatttggcttcatgacatttttatcagagattcaaaatctcagatgaaatccaagtcagcctgttttaccagttgtcgaaattgccggagtgcagcactgtggagaatggcagttgtaataaatgagaaataccaggtgtttgaattagctgtagattttcacattgtctcttctaaccctgcttgtgcccccgcagcctttttccatttacaactcagtaatgtttgttttcacagagattaccggaggaaatagattataaagggaaatgttggcatttatagtagtactatttcaaaataaggttcacttttcactttgtatttcattgttcattgttattttcttatccaggtcaaactggcagtttcctgttggcttgccagagtatctgatagcctgactcttaagttcatttcattttctagaatgttctttgttcccctctccagttccttccattcccttggacgttctttcagcatcgaactcctcttctcagttaatcgtgaagtggaaccctccctctctgcccaacggcaacctgagttactacattgtgcgctggcagcggcagcctcaggacggctacctttaccggcacaattactgctccaaaggtaagggtgcagcagcggcctggacggagggtgtgaccgttcattcctgtggttgtaatgtgcctgagccctaatattacacgtatcagacaacagtgtagttctccattggaaaccagctatcttctggttttttttttttttttttgagacagagtctcactctgttgcccaggctggagtgcagtggcacgatcatggctcactgcaatttctgcctcccaggttcaagcatttctcattccccagcattccgagtagctgggattacaggcatgcaccaccatgcccagctaatttttgtatttttagtagagacggggtttcaccatgttgcccaggctggtctgaaactcctaacctcaggtgatttgcccgcctcggcctcccaaagtgctgggattatagccttgagccaccacatctggccgagaccagctatcttcttgattaaaggtactgagagctattatttttccttacaagcatgtataacggctttcattcccactcttgttttggcttttcttttccgagaagacaaaatccccatcaggaagtatgccgacggcaccatcgacattgaggaggtcacagagaaccccaagactgaggtgtgtggtggggagaaagggccttgctgcgcctgccccaaaactgaagccgagaagcaggccgagaaggaggaggctgaataccgcaaagtctttgagaatttcctgcacaactccatcttcgtgcccaggtacccagctcatgtgaaatttcagttggcaaaacccactgctcaggccggttctgttgcctttctccccaccaggtagtgtgtaagtcagcagctggggggtacaatacagtagccactgagacggagccgaaaaagatgacaggttcggtgaagtgagtccctgcggaagccagtcagccctgaagggaacagggaccagggcttgggttgctggggccaccggtgtgacaggtactgctgtctcagccacaaccccccacagagagcaggtgggcaccctgtggtagaggcagggaggggaaactcaaagagtattgacagctgctgcctggtgagaggaaaggccaggatttgggtccatctctgcccttcctaattatctttactgcctctctcagcctcacagaggaggagtgaagcaagagggaaaaaagtcagagtctgtgctggaaagggcctgacttcaaaacatagccaggtgccacaggcatcctgtacaagtaagtttgggaagcagtgtagggcgacagcctgcattggctgtttattccgtggttactctgtctttcaaagcaacacagcccctgccccagggactctgctcctctgctgtggtcttggtttctggggagtggggacaaaagcagaggaaagtaaacgttcatagcaggactgttcatagtagccaaatctggaaacccagtgtacatcaacaggtgagtggctcaataaaatgggctcgaaccttacagtagaatattattcagccataaaaagggaggaaattttgatccatgtcacaacacagatgaaccttgaagacaccatgccaagtgaaacaaggccagacacaaaaggacagatagtgtatgattttatgttgtgtgaaatatatggaatgggcaaatgtatggtgacagaaagtagatttgaatttaccaggggatggggatagagtgtggaggggaatgggaattattccataatcgataggttttctatttggagtgatgaaaatttttggaaatagataatgatgatagctgtaccattctgtgaatgcaattaatgccactgaattgtacccttaaaatgattaaaatggcaactttttatcttacatatattttgttttgttttaaaattttattttaacacaataaaaaatgttaaacaatttttttttcctttcaaaaaaggattagcccagtagtgtgtgggaaaggagatggaagcacagtggtgctccctggccccctcttcctgtaagattatagtgcagattttggaaacgacctcatgcctgaaaactaggccaaggagttggatttaaatcagcatggcacccatgagctgcccatccgcagtccccacagcacccgctgccagcaccccacccagcacgttcccttcccctcactgcccccgaccctgagaggagcctgtagcggctatttattccacagtgactctgctcttacaggctttcttaggctgtaacaacaaatggtttttaaagtgattttttttttctgccaagtgacctttttgatatttgcaaaatggttgaaatagctatctcacttcgagaaatcagtaaagtgggaaataaagactggttagaactggaggcattatttccttttgagagtgcgcctcttcattgcttggtggcttttttctcctcccctcctctctcgaagttcaaaccaccagagcagccaggcgcggtggctcacgcctgtaatcccagcactttgggaggctgaggtgggtggatcacaagatcaggcgttcgagaccagccgggcatcatggtgaaaccctgtctctactaaagatacaaaaaattagccaagcgtggtggtgcacacctgtaatcccagctacttgggaagctgaggcaggataatcgcttgaacccgggaggtggaggttgcagtgagctgagatcgcaccgttgcactccagcctggacaacagaacgagactccatctcaagaaaaaaaaaacaccagagctgtgagaagggcctgcgaggccctcatggcctctcctagcctgccccgctgggggagtcttctgcctgctggtgtgtggcagggctttgaatgtgaaccttgaggttcagtgcccaaggccattttcttatccaggatatctttgtatcactggtggttcctagaaagcagaaagtttgaggactagaaagattgcaaagaggtttggaaactggaactcaatgaggtttggtgacttctctgacatcctaattaattaagaatccgtttgggacctggtcctcattcccacacaccgactcttttccccctcttctcctccattgcgttgcttctcgtggtcctttccacctagaccagcagaggcttagctcgtggcagctcctgctgcccgccacacggaaggatggatttagagtgtcccaaagcaggctgggcgggaagtttgtttttctctatcatgggcccttggttacgttgctgtcttgttccaccaaccagcaggaggttcgggttgtgagtcaaggttttggaaagattttgctgaaaggccccttgctttcagttgtagttacgaggcaagacctgtttttttctcatcagatgtggagcacaaggtgaagtgacgtgaaggcagagctgtgattgacatgttattaatgcacagcattggtggtgttgggttcaaaacaagtttcctgtgttctactggagaagtgtgtttatctgtcccccgagtccttcctttctctctcctaagacaagtccaacttgtgattctctgttttcatggatgtatatgaagacaatattttgtccgtggtgagaggccataatttttaagaagttaatatttgtttttttgcctcctactgagttctggcagagtccaggtgaaggagtgtccagcagagagaatgactgaatcacagaggctggctttctgttttacacgtggattgtccgaaaatggatttgatttctttcagttcattctgagaacaatgtatttgtgggataaaaccagttaagtaagatttagttccttataaattgtccagaatatcctgtatgttttgaagtacagtggaagctagagtttgtaaaacttactagtttctgaagtcaatattcgcagtaaatgcctttctttgactactgtctttattttgtaaatcacatagtttggtttaactagctaaaatgttgacagatgttggaaagtaaaaggttttccaatagggctaggttgtattatgggatggagtggggaaagttggcagtaatgtttgcttttgggcgtacgatttggaaatgtagttgtttaccaaaaaaaatgatgtatgggccattgtgcttcccctgttcctgccttccagataatgttctgtgtcacctccctccccttgtcactgccttgatgtcatcagcattgagagctgtgcagtccctaaaagtgtgatgttgataaacaagtaaactactgagtatacttcatgaagtaatcccagttaaatgggggtgggctgagccgggagaggggttttgacagaattattttgcggtacatcaaacctaagcaacttctgacagacacaagtgtatgttgtgttggttttgaaggtaggcaggaaatttgttgatgatgtgttgacaaagatttccctgacagtaaatgtggtttcttgtgtttttcccttccgggaagcttggttagctagttggttggtttgcagagtgtgaggattgtggatgatcagcctcatgtccttacccttcctcccccagtattgtgaaagcaaatgtacacgccctgaccttgtggttttctgcttgttggaacgagcatatctgtgttgggcagttcatgccttcggtaggacccccgtgtgccactacacaaagaaggaccgtgttttcctcaggggaatccatgggctgagaagactggggagcctcagaggccctttcccaaagccctctgctctccccttccaggttctgacctaaggaccagccagaagcctgccgagcgtcagccgaacctgcaagtggcttctgggctgttccgttccctgcgtgagctttccctctctgctgctgctgccgcgctctcccctccatggcactgatgagcttcccacattctggactttctcatttccctgggcagatagaattcatcccatttgccccctgccttttgcctattcctaagaccggtgaccccagccgaaggcctcagccctgttttctcaccattcgtccatggctgacctgagggttgccctttctccatctgggtgctcctctcgtattctgtttgtttttgttggttcctgtaaacattagaattctgttttaaggtttctagggggagccacaaagcccatttcttcatatttgaccaaagcagcaattagagggtcgcaccctcatgcctcatctgccctttttggtgagaatgtcctttttgtgatgactttatgcactcccttttgcttttcggttgttccaagccccattcaaatccatgacgaggactctgctctctgatgggcaggaccttgatgaggccacaggtgctcactgctgagtgggaggaagcctgggtgggctccagggacctgcagagtgtagcaagcacagacgcttggggttgggggtgggctcgcagcaggagcccccaagaagagagagccctggggtccgtggaactgcttgctgctagactccaggcatctttatttccacagtcagagcaaatccaaggagccaccaccacaggctttcatatccctctgccccaggtctctggggcctctgccacacacctcacctctcccctcctgccctaataaatcttaaccacagctgataggtttgccacctttaaggcttaaccataaggtctgtgaccagatggcctgagtgttctgatgacacagccaggactgcctggccaagagtggcagagacactatttgcctctaggtaaaatcgaagaaccactctgagagccggggggtgggggtgagagtttgtgtgcccattctgacacttgcagagtagagaaagcaagataatgaggaaggacatccctgtgttattcatgagttcttacctaagggggctcaatagctccttctattccacggttaagattcttctgttactcttactcaagtcatagaaaagacaaaagaggtaaaagtacttaaaagccacatttctctcctccttgcagacctgaaaggaagcggagagatgtcatgcaagtggccaacaccaccatgtccagccgaagcaggaacaccacggccgcagacacctacaacatcaccgacccggaagagctggagacagagtaccctttctttgagagcagagtggataacaaggagagaactgtcatttctaaccttcggcctttcacattgtaccgcatcgatatccacagctgcaaccacgaggctgagaagctgggctgcagcgcctccaacttcgtctttgcaaggactatgcccgcaggtatggtatgatccagctggccccattgccaccttcctcacaacctagtggagaagatgtgttttatggacacagggtctgacacccagggccatgacccttagacccaggcctgcctgctaaataacgtgcagtcattggcaggtggcgtgtagaccagctgcccagggaacagagcccacgctctcctagtgacaccactcccagcttggtctctccatagaacgtgctgggagcagggagctgtctgcagggtccaccctccacctgctacttggtgcacatcgtgcattcctgctgtcctttgccccctcttgcgcacaaatcgggttgccccctcctgagctctcacatgtccagagatgtctccagttagttgccttgatccagagtaaacattgcccctcaagatcaactcctggagcagcctctggtcttgcttatttagtctttggctttcccttgttgttagacactgcctgtcactcgggcattcatccatctttgaaggtgggtgccttcaaagacagaacaagagctgccctgtcctttagtaggcctcaggtggtagaaagagcacggaggtgaccagagtctggggtgtggggtcctcctgggtgcagttctggcactgaagtccattgtagcgtgccttgaggcagtcgtcaggctccctgcctcagtttccttagccctcctgggagagacatagccagctaacccctcaagtgccttttccggctgtaactttccatgacctttgcttatcacaactttgtttactgcttcaagaagcaaaagcaagaaaggaaccactgcaaggtcagccagccgctggaggagttggtgccggcagggagggcttgccctgctcttagcaccagcctcctagcagcttcctcacaggccgggctcggggccatccttcgtgcctgcataaaaattgcagttgccgcgtgtagacgcgggccacggagggtccctgtcacagccggcaggccccgtgtcctgcttctgcttactcagcatctttccagggctgcttgtgtttgatggcttcacaaagctttcttttttcaagtggtaggcacagggtagaagaaagttacttaggttgccaagattttcctgctgtgcttggcagcaggctttttttgttgagggactggggagaaaggaggatcttgtggcatcttgagacgtgcaagttttgtggttggtgtattctgaaccctccgctgtgtgagcagcccgctcaggggcagtgtacgtggctgatctccactgtcctgcccgcgtggatgggggcgttattctcagtgtacgtggctgatctccactgtcctgcccgtgtggatgggggggttattctcaggtcagcccagtgttggcctccctccctgggaacccaaatccaactttgtcacctgtttaaattgtacagaaggagcagatgacattcctgggccagtgacctgggagccaaggcctgaaaactccatctttttaaagtggccggaacctgagaatcccaatggattgattctaatgtatgaaataaaatacggatcacaagttgaggtaggactggggcagtggcccgtgcctgcatgtacttccatccattgacagcatatgctacctgactgcacaggttacctcctggttagcataggacttaaaacaataaaatccatgccaagttggtgaggatttgggtctttctacccactctgtactctccaaggagtactgcatagtgtgcaaagagctaggctgctttttgccctcaagaaacgatttcattgtgtaagataaccttgtggcataggccaggtcagttctaataacttttaatccttctggagttcttggttacaaaaatgtttggttaaagcttttgggtgtgcttaaagctacttgaagacgaccttttaagatttgatttctttgtctttactgacactcaggatcattgttaggtgggaggtcagatcaggcagctggagtccccagtgtggtgagtttagttggcaggccccagatttctcctgcattcatgggaaattgacatgtatgttttatttccccaggatcagcgagaatgtgtgtccagacaggaatacaggaagtatggaggggccaagctaaaccggctaaacccggggaactacacagcccggattcaggccacatctctctctgggaatgggtcgtggacagatcctgtgttcttctatgtccaggccaaaagtaaggcttgtggagggagaagaaacgtggtaaaactgaaagcagggtggtccaggatcaggacagcccgagtgttcatggctgtcttattttctgttaaaatggagttggccagcttccagaagggtcatgctaaggtgccggcacataccggcactgtgtgtgaaaggttgggcagggcagatgccgagctttgggctcctacctcatgtggcaggaagggagaggatccgagcctctcctttgaggttgtgtaaccactggagagccagaggagacagttgctttcaacctggcttacattcaaagacttttttttttttttaaacaaaagacattttataaagcattgaattgaccattccacctcctacttggtcagtaaagctagatagggctcggattcagggcttgaaatcctaaggggtgtaaggaactccagaggtcatctggttcagcctgctacagggcaggaatctccacggtagcatcgcagaccctccactgtccttttaaagtccccacatgcattggaaatgtacggtgctcaccctttggtacagagactgaggaatgtgagtttatgctcaagtcattaacaagacagaattcttaggctgttctgtgtgatgacttcagattttaaaacaaattataagatgtataagcgcaacaagggccacatacttgttgtttgaccaacaaaacttagtattttggtgaaattagttctgtgttgagtttctgttatttcttatttcaaacccagtttttaagattatttcatgttcatggaatgggatcaaatttggcataacacataaaatagcaatgcagcctcacttagtggtaacacttttgggtctagtgggctgatctttcctggtgtccacatttctgctactcacatctggagttacgttaaaacatgcactccgccgggtgcagtggctcacgcctgtgatcccaacactttgggaggccaaggtgggtggatctcttgaggtcaggagtttgagactagcctggccaacatgggtgaaaccccgtctctactaaaaataaaaaaattagttgggggtggtggtacacgcctgtaatcccagctacttgggaggttgaggcaagagaatctcttgaacctgggaggcagaggttgcagtgagccaagatatgtcactgcactccagcctgggtgacagagcagaactccatctcaagaaaaaaggaaaaaaaacaaaaaacagcgcactcaataggtccagcaatctcacttctagtatatttccaaaggcaatgaaataggtatgtcaaacagctctctgcactcccatgttcactgcagcactattcacagtggccaagacatggaatccacctgatgtccatcactatgtatatgaatggataaagaaaacctggtacatatacattatagaatactattctaccataaattagaaaagaaaaatgtcgtttgtggcaacctggatgaacctggaggacatgatgttaagttaaataagccagacacagaaagagaaataccacatgatctttctgataatgcggaatctaagaagttaagctcatggagagtagaatggaggttaccaggggctgagggtgagggagcagatttggggagatgttagtcaaaggatacaaaatttcagttagataggaggaataagttcaatagatatattgtacatgatgacagtaataatgatgtattcttaaaaattgctgagacaatagattttaagtgttctcaccacacacaaaaaaatgtgatgtaatacatatgttaattaggctcattcagctgttctacaatgtatgcatatttcaaaacaatatgttgtacatgataaatatacaatttttatttgtatattaaaattaattaattttaaaaaagatctccagtagtcacctggtcagcaccagatattctaatctgtttgtgatatctgaaaatcctaatacagacagcaaaagcaggatggggtgaatagaactgcaaatcttgagccaacattttatgtgcctggcactgttcctgggttcaggtttttaggggtaaatggatgtttaggcagataattttgtcaattaaaatagtctgaattgttccatctagtccagttaacctagtctcaccagttagtctatgccacctttgcagcacccagaagcttcataatattcctgcagccttgtccagggtagtggcttgcttgctttctatctttccccagcctccttccctcctctttttcctcccctccatctcctagaaacagatcctagtttgggggtctgtgatctgtgaaacagcaaccttggcttctggggttgagtgaactcagcttgttttggtgacatgacatgttcctgtctggctttgctgctccatttttaaccttgtaagtgccaggatgccagtgggaaatcgggagtccttctgatagaatttttccagcagatgttatcacgtactgcagggaaattggatctgcgtgctggccttactgttgagaaatttttccttatgtcagacaagactctgtcctgctacagtttagtctcatttcctcttatttaatcctcagaggagatggaaggtttggaagctttcaggcaactgccttccttttaggaactccttgtgtgcctgaatactattaaattactcctcagacttctcttttccagatgaaataatctcaggtcttttggccttttcttgtagcccaatatcatacaccagtttcctagccatttaatcatttttgttattctctggatgtgttccattttctccatgtccctgttgaaatgtgaaactcaaaaagaacacagtacagcctgaccagtagtataagtgatataaacagtgatataagggccttgggggaagaaagaaaaatctgccagctttccgttggtaatgatcacctctgagtgtttttaggaattgcaaaatgctggagcctgcatccattttgagagctacaatatcaataaaaatatttctttcttcgattaaaatacttctaattttaaaaattaaaatagctgtagtagtctttaaagagtaaccatgatcacagttttccatggcaaaataatcattgataggggacttacgattaatgtttacttgatccccagtgattccaggcccatttccacatagacatctgtatttggacgtcccagagaggtctcagattccttgtgccaaaaccaaaatcacagttgttgccctcgaaaggcctcttctctcctttgctccttagctcagtcagtggtcttgtaatccatttgttacccaagccaggaacctcacagcatccttcactcttctttctgttcagccacccctttttcattccaacccaagcctcatggattctgcctcttaaatgtctctggaatccagccctctgtcaccaccagcaccgccacagctcagactccaggtcactcgccttggggggatggtatgagctgtcatactgtatgagcctcatcctggggccatgacttaccaagccagatcatctctgtgagtctgcctggtgtaaagacaaggatcagtgacttctttgtaggtctgaactgggtaatgcagagcatgccctggagacatggcatgtccccccaattctccaagacatgacagtgccttctcttactgccaggtccctccgtctgtcctcagcacagccatttccctggaacgcgaatctgatcagttcactgctgggcctgaaagctttcgctgactccttttaatctgcagaatgagggtgaaactgcttagcttgggctgggtcccttgtgagctggccctgacttctctccagtatcatcattttctaggaaagccatttccccacaacccccaaggaaagcatatcataaacaagttttcccttggggaggttccctcgactcccttctctcctctcccttcctctctgaattgttgccatatgtgaagtccacttttctagttgtcatgctacctgttgacactaatttcccatgtcccacagaatgttccagggtatgggtccatgtgcctggtgcccagcctagcatctgccatacaagtgctggttctgatgatcagtggcttctgtggtcttagacttgtagcaggactcaaatgtctgcagcggcattggaaaggggtgccgtccagtgtgtgcatgtgtgtgtgtgtttattttaaattgtctgtggaactatctcaaagattgaggccagcaggacttgacctatacatagatgtagactgtacatagatgtaagaatttctattcattttatgaaaatgaatagaaattttcattctatttattagaaatagaatgcttgctgctgcaagcatttgagtccttttacaggtgtgagatcacaaagaccgcttaccaacagaaccaacacttgtatggcagatgctaggctgggtaccggggacatggaccaaaccctggaacattctgtggaatgtgggaaattagtgtcaaatgtatgcattttcactaacagtcattaaactgcgtacaaagattatttttcttcagtctatcattgaaactattgcaccagaatatactgtactttaaaaaatgagtatatgcctcagtctgcacatatttactcttttttcaaataattgtttgtttgccgtgttctatttctgacaccatttaccttcaggaattcttactgtatgatggggagtaaacgaatatacaggtatttttttcatacttccaactgaatgtgaagaaatgaaatgagcaaattgttcacctggtgatattttatcatttcctcctctttgctgcagcaggatatgaaaacttcatccatctgatcatcgctctgcccgtcgctgtcctgttgatcgtgggagggttggtgattatgctgtacgtcttccatagaaagaggtcagtgatgtgcaaagttatgacactttctgtggctgagtggtttgatgatttgaatgtgagtgaaggtgatatttttgaagatttcaaggaaatattttatggactggaaaacctgattttcccatcaaatgttcttccaggaaaagagaaccttttctaatgattttaacaacagccaaaataatttttcgatggtacagaccttcccctggctggcttttctggtatacagatactgctgctggtgcatacttttccaaacgcgatgcgctagccttcccaatcaaataagcctttttatttccaatgaagtaaagaaacagatgtttcttaaaaagcgctaatctcaggctactgaggaagccagaagatgtgttagcaaatgtctgctggctcacccaggcctgaattgggagtgtagacaagagctgctgtagacagtaagctctccccattctgttctgataccgtgtgagagaggataaatgaaactgttgtagcgaagatgaaagtatatacaggaatgtatggaggtggggttttgttaacgtgaatttaatctttttgacagaaataacagcaggctggggaatggagtgctgtatgcctctgtgaacccggagtacttcagcgctgctgatggtaagagtccgggccaccagcactgccagcgtgcagggcaggtagatcgggagctttcaggagggttgctaatttgggaaaggaaggaggtttgcattattttgagctacctttggccttggatctgtcttcattaatatttctttctttctttttttttttaatcaaagtttttagcagttcagtgaatatgtcaaaacttgtgggactgtatggggtgccccaaggaaacacaggctttagagatgaatgtggccagcgcagtaatcaatttatttaattgcttgagatgttatgctagaatgaaaacagctttttaattgttaacatctagtcagaggatatgctgcagctgacaaaacagtccttttaaactagtttcagcttgagtatcatctcattataattgtctttgatgaattacagctctgcttttttttttatcatggaatttttctgtcattcccttccgactagggtcatacgctcgtggctcattcacattccccttggtaataactaatgagggccattcagttaagtggctgggaaggtctgacatggaagttgggtgatcctcaatggttatttccttttttgctctttctagcatttttatatccagaccttttgagtgagtcggattagggtgaggggttggtcactgagtccagtgatactaggacccttaactggcactttgctaggggcttttacaaacaccatcccatttgtttcttaaacccctgcaatgtgcgttttcttaatgcccatctgcaggtgaggaaatgaactctgggaaaaaacttgtgcaggctcacatggttagacagttgagaagtcaggaggagaatggaatcactgtggaaagggctgtgaggtcccccgggcaggcaaggaaacagccctcaggaggggctggaccggattcatcaaatgaataataaataagtgcatgatgttgagtgagtacatttagaaaaagtgtttgctgtcttcttgcctcgggagaagtgaaagtagatgcaggagatgtgaaataaagagacatgattattctaattattgtgatcaaataagaaaacataagaaaatactttaataatgtgaaaacaccgttatactatgtagggttttactatggtttctttaataatttctaattcagtttatagtaaagtcaatcaaaagcagcctcctctgaatgggaatcaggtgcagaataatgactttatttctatctacataaaggtctcacaaagttggttttttaatagtaatatatatatacatacttctgtagtgtgtgtatataaggcagagagaacattctggacggatgcacaccacacttacaagagttgttacttgtggagaggatctttccctttaaaaaaaaaaaaaaaaaaaaagccagatgtggtcgaaggcacctgtagtcccagctactcgggagactgaggtgaaaggattacctgagcccaagagctgcagtgagctagaatcccaccactgcactacagcctatagagcgagactggctcttaaaatccagcaagaagatagatatgcattgtttgtatgaataatagcttctaaaaagaaaatcagtaaggaagggagtcatcccagatgatggaattgatagaacaaggcaagaccactttctccctctgtgagggtggactgtgactctacgagagaagctattctgctttgaaatgcggcactagaggttggtgtgtgtagcttttgactgtgaagtgtccaggaagagaaagcatcaatacaacaaattcagattctcagggctctcatggtgacttgaattcacattttgtgtccttctagaatgctttcatgatacgtcttggtacttcattacaacaaaaacaaacttattgccacccaggtcgacaggtgggaacagtgtcaccttatttgaacttaatttattcggcctttgagaagcacttatagccagtttcctcgaggggcaacaaaatgacattgcagttcaaaagtgctttaaaaacttctttttcccaaagctataatctgcatgtcaccattctccagagtacattgaaaatcccctacaggaaagtgctgataacattgtgcacagaaaccgctcctggctggtggcactggggacgcctgcttaaagtcggagccgttgggttgaatcgagagaaaaggattgagcgtattgacttcagggacctcccagggaatgaatgtgattggtttcaactccatgttttatggcaggctaaacagttaattctgattaaaagcaagcctggattctcagagataaatggctggagacagtgaactctttacactttctgaggcgcattgtgaagagccttatctcctgggttgtcttgcatacttactctcctctgacaagcacccgcctcttcttcaggggtgcaagccacctatgccagctggagggcagagttccattcgtgaaacccttgaaacatacgtactatgaaatacaaaaatgtgtaggaaagaaaacaagattattaatgaagttcatattggacacccctcagaggtctaaaatgatggtgcccctcctgggcctaatttataataaacatctctcctttgagacatcacttaaaggttgatagttgggatatggagatgttaggatacagttgtcagcctctcacatccagccacaggcccagggtcagcatctgaaagcatgaaagcaaaaacaggcaccttctccacctcctttctgagccaggaccacctccttcccacagtcagtgtgtggtagagcctggtggcaggtcccgtcaggcaaggacattagcacacagcgtcagaggaattactgacatttcatatggatcttatggaacaggttgattttattttcgtttttaccctacccatttggaggtgtagaattgagcctgtgtttggttttgttttctttctttccaacctttttcctttctttctctttgttttgccttccttcctgcatagaaatatttatttattcattcattcatttttttgagacaggttctcactctgttgcccaggctggagtgcagtggtgcagtctcagctcccagtagcctcaacctcctgggctcaggcgattctcctgcctcagccccctgagtagctgggattccaggtgtgtgccatcacacctggctaattttttaatagagacagtgttttgccatgttgcccaggctggtctcaaattcctgggctcaagcgatcctcccaacttggcctacgattacaggcatgagccaccgcacacggcccatttattttcttaaaccagatcgaatctaaacagaaacagaaactggagaagaaatcctattcaggcttggtatctactgtgcattcctcccaaatctctacccattggtcaaggtccctgagttcacagagcccaggccagagccctggaaacgcctctgcccgtccgctgcctaattgcctgtccacgctgggcaccaccgggtctctccctcagtctcagagctcagttgcttctgcacctcatcagggatccagccatcaaagccaaggctgggggacacttggactagagtaatcctaccaataatgcagttcagctttgtaaccgcaaattttctagtagccgtattttttaaaagtaaaaagaaacagatcaaatgcattttaatagttttttagttccaataatacgtttcgtgtaacccagtatatccaaaatatccattttaacatggagtcagtattaaagttacctaaatatttcacttttttttttttttttgtctaatctttgaaatcccatgtgcatgtctcaaattggactggccacatggaatgctcaggagtcccatgtagggaccagctgccatgttagatagcccaggcatagcatctgtgttgagggccctgacacctcttttggattcatccaagaagtaggaccttacgtgcaccatcatcacctctcatatgtgactctggcctttttcccgacccagcataagaactcttccctctccctactactctcctcctttttacatttgcgttttaatctgttggtgaagatgggtaaaatcctgcttgaccatttcattcagtttctcaatcccctgtggttaatttgtttttttcaaaaatgtgtttttatgtgatgaaaagaaatttttaaaaaccaactgctttctttcctatactagacttccttgctttgttctggtccttctatctgttagtatcctcaaattatcttgaaatcctcagagatctgaaatactagtactgactgtacagttttcttactcaaatctatagcatgtggaaagttgacatcaagccatgccatcgcctcctggtattctctgtgggtttaaggaagcagcatcttatattctttggcttagagttcccccaaagcacgttctgtctaagggcttgtttctgtacctgctttaattacggtttcttctccagtgtacgttcctgatgagtgggaggtggctcgggagaagatcaccatgagccgggaacttgggcaggggtcgtttgggatggtctatgaaggagttgccaagggtgtggtgaaagatgaacctgaaaccagagtggccattaaaacagtgaacgaggccgcaagcatgcgtgagaggattgagtttctcaacgaagcttctgtgatgaaggagttcaattgtcaccatgtggtaagagaaagttcctgaaaagccaaaatgcagcacagggagagggtatcacacaagcctcccagtatgttcttggctgcatgtacccgtgggtttggtgtcttgcctttgccttctggatagttaccccattacctcactgctaccttcagacccctgtgctcagaccaggccgcagcaccacagagacagttccagacaacacaggcatcagcaagggccacctgaccctctgagtctttctctttttgattcctcccaggtgcgattgctgggtgtggtgtcccaaggccagccaacactggtcatcatggaactgatgacacggggcgatctcaaaagttatctccggtctctgaggccagaaatggaggtcagttttcatttccaccggtattgcatgttgcctggcctgctctcttttcctttataatctccctgcaaggaaatgctgtgtctttaaatcagtttactttccagcatccagtgtttcttactgcatgctcagttgtaggtcatttatgcaaaggatttccccaactagagtcagactctgatcttcgtgaggggaacttcctgttccttggatcccctctgctaagcccctctgtgcctttgttcctgcattccctccacccccagtcccctccccacatcagtgtccacctgccaagccaggccagcgccactccctccccgaagctttcctgccccactccagtagctatcttctctgctaacttctcgatgcgcttgactcacatcctcgtatgtgttctctctcgttatgttgtgttgtgctgttgttggagtgtgtcccccctccaccccgttgtgtttagcttttcatctcagtccaagtgtgtggctcagggccgcatttgtggcaggcactctgtcaataaatgtatgttacagttcaaggttaagctgcctggattcttgcccttgcatctgggaagttgctgggtgatttcccacccagctccgtgcgcaagatgtgcactcattcataaaccccctccccacacacagtccccttccccggcattgttggcggtccttgtctttgccactgggaatctggtttcctcagactctacgtccacgtttcaggattgatccagagtcagtgtcctgcttacgcttttgaatgaatgatcccacctcagctgcaggatttctgcttagtttcctaaaaatttcactttgggttatgagcttccaattctaaacctgctaaagtcctatgcaatttttcattaaaagtcaccgtggtgtctcccccctctgtagtattaacccacaggccagctttttaacatatgcgggcatgacttttgagtaattaattctacaaataaactgggagataaatgctgagacataaagccagcaagaactgagttttcatttggttgcctccgtgggtctgaagtctttgacccttactttgctgcttactgggtaagcagtgtgtctgcttttattccttagaagcagtgacttccccttctcggcccctttggaaattcttttgctgttcttcatttgggcttaatttttttttttttttaatgttctttgaatcggcaacttaatcatctcccaagtgacagtttcttaattttagttccaaacacctgttcacatatgacttcatgtatttgcagcacatggtgtttggggccaagtgtggactggggcttcaagcaggatggtttacaaaactcccaccctctgttctgccaagcattggtccccagcacccctgggtgttagtgcctcttcctggttcactcactcactttctctggccctctctgtgtctctgtcactctctttctttcgagatggagttttgctctgttgcccaggctggggtgcagtggcatgatctcagctcactgcaacctccaccacctgggttcaagcgattctcctgcctcagtctcccaagtagctgggattacaggtgtgtaccaccacgcccacctaatttttgtatttttagtagagacggggtttcaccatgttggccaggctggtcttgaactcctgacctcaggtgatccacccacctcagcctcccaaagtgctgggattacaggtgtgagccgctgcgcctggcccttggttcactttaatacacaaaacagcatgaaggagaaaagcttgatgaaataggtgactggagatctggcagagtatttcttgccagcatcgattgaggcacctctgaaaagtccaaaactcactcccttcctccccagtttcaggcacagaataaaaattcagaacacatggccttggtcctggctctgcggctggctgcctgtggtcctcagacagccgctgcaggttcctgggcctcagtgtcctcaatataaaataagagggtgggacaagattactgaagtccctttcagaactaaaattcacctttagattggtcagatttaaactttttctttctagctcatgtcaagtattaaaatgtgtgcacttaccctgcagtttcattatattcaacctgctcccccgaccaagtttcacttacgtatctcactacgagtaggtgtatatgtatacttgtcttaaatagctctaaccaaattaaaggaaagaatggcagtgtaacaccatgaactgacaaaatttcagccctctgtctttctccatgcttaaagttgagtgcttttgttgattctgttgctcacggcaattataaatgaccacttcataacacatataggtcatactgtaatatttaagaattgtgagcataaactttacatttcatgtgcatatttcctcatgcatcacacgtatctaaagccctgaaaagtagtgatttggacttacccccagtgacttaatgttgcttccccagataaccacgtgataagtgttttaagtcaccaagagacagctttgacagcctgttcagaattcaaaggtttgtgtcaccaagtgtagagaaccaacccagaagtaccgaggagttgttataatgattccaaatactagctttcagtagaaactagcacctcacagggcagcagccagcatccactgggcattgactatgtgccacgcaccactgggcactttctgtgcgtggccccaggtcatcttctcgtcagtgaaaccactgtgataccccatgtggaaaagcctgggcatgctcagctggtggccggcctgcaagtgtgggacctgtcagagccctatggctttgcagtgctgtgtgagatgctttgtggtcaagaaaaccaaggtgtagagtctgttgcacttgtatatgcaaaagtaaaaggtaacattaaaattagggactagtgattgttttaggatggagagacttgggcatgtgttttatataaaacttttttctaaatggatgtattatttaagggtaattctttttaattccaaagccagcacgttgctgtcctctgcaaagaggaatgcttatccctgttacttattcctggtttcctccaagactagtttcagctggacttcagttgccaaggacttgtcttccgtaatgccgacagaaaataataatgccacattgtaaggtgaaaacagtaatcctggtatttttgtattttagaagaaggttgaagggaaagaaaaggattaaataatttataacgatgctcttatgggaaataaaatataccatgtccatttggaaacacatttgcttacttccacacagcctttgtaacgtgctctccttcctcttacctgtacttcggtgatggaaataaaaggaacatataaacaaataggaatttgagtaactgagaatccttactaccaaaaatggcttgtttcactttaaaaaaatgttgccctacccaaaatagaaaatgttggtcctaaagagtgcaaattggtgtttccctcaccagctctgatgtggtcagggagcaagtgcaaataagcttgcggggagcaagcaggtgccatgctctccatgatggtttgttccttccgagcaagtcctggtttcttagcataaacaacccacggtgcccagattgaacaaagatgatatgcaaacctcgaaagaaattggcatggaaaaaaaaaatccaaaattctcatgtgaatttttttaaatctccaacagaataatccagtcctagcacctccaagcctgagcaagatgattcagatggccggagagattgcagacggcatggcatacctcaacgccaataagttcgtccacagagaccttgctgcccggaattgcatggtagccgaagatttcacagtcaaaatcggaggtgtgtccttagctttccaggtctgggcaagaactaaactcaggtgttttgaggactttgttggcattagtctgcccctggagaggttttctagtgtgtcccttgagtgcacggactccttcttgggaatgatgtgattgtctccagttgatggtcacaaacctggcacggtcggtcccaatgctgatagctcatggacatggtggttcagatactgggcacggtccctgaggctggctctccagacgtttgaggcatttcttggtagaacacctcttagcattggttacagaaataattaagacaatgtcttcaggagattttgacttgggaataaaactcactgtccaaccttgcattcatccctccaattttcctagcttttaaggagcattgctccccttccagggacccacattggtttctaagaggcaagctgccctaatgacgaagcctctgcacggagcaggagcagtggcaggagctggcatggcagtcccttaggtgagggacgatcactgctcactgggtttcacggctggggctggccagcctccaagctctcgaccactctctcacaacacttactgtcctgctcttagctcaccagcctactggttagactcccttgttgccaccacccactgtcacaccagaaaaaagggttggattgaatttctgagcaatggttaaaacccacttcagcctttaggtttgtgtttttacttcggtcttttaatctgcctaataaaaacacacataacatcagggctgctcaggaaaccacctgcttttaccaggattctcatcttcccactatgatacaatgatagtttagaaaaataccaaatatttatcctgagaaactgcaggggagatttaacacccaaaagaagctatttcaaatggacctctgtgtctagttcttgaactgccttttctggaagtgttcaccttcctttagtaacatatttttttcctttagtagtgatgttttaatgaaatgttttagcccctttggtgaacaatgagaatcttttagagaacggtttctttttttgagacagagttttgctcttgttttccaagctggagtgcagtggcacaatcttggctcaccacaacctccacctcccaggttcaagtgattctcctgcctcagcctcctgactagttgggattacaggcgcgtgccaccacacccagctgattttttatatttttagtagaaacaggttttcatcatgttagccaggatggtcttgaactcctgacctcaggtgatccacgcacctcggcctcccaaagtgctgagattacaggcgtgagccaccacacccagctgagaatggtttctaaagtaggggtgagtgtctttctttttactctgtaggagctagaggtattgaaatggaaccatatcccagagcccacatccctccgtcatcagagttcctcattcaggatccaccagtgtgtccctaggtttggcacgttgagacgtcctcacgtttggtgctctgtgaagctgggcagccctcagagaggcaaagaagtcccaagaggccgtcctgcctcagggctctcaggaaagagccgcccgcgtccctggctgggcttccttggtgcacccagctcatttctccttccctctctgtagaactcacattgtccccgtggaaatgccagccagctcccctttcccagtgcaggggggagccaggtgggcctgaggtgggccagttctgccgctaatgggtgagagacttgggccaggtgccttacatccgggagcctcagtttcctcacctcggaaatagggtgataatgtaacagaccccatggggttatgagaaggacttggtgcaggaaagcagcagcacgtgcctggcacagggcagggcctctccagatggcagttcctgtctgtgtcttattcccaccctccgggcacatggggggaactcagtttctccccactgcgcgtcaccctgggagaggtgttttttgtgccaattgccattttaaatccaaatcagcagggatcatgtttgctgttcaaccatgtggcatatttatagtgattttttttgtaatcatggtttttctttctggaatttcaagtttttcatttgtgctgaggaaggtcgtttgtgttttttaataggattccttcttttccaccttgtgcaagtaaaggcaaatcccctatttgcatgtcactgtattaattcacagataacactttcacacttcatttttattcttctcaagggctcaagatgttttcccaatgcccagcgtctcatggatgacaaatatgacaagtaattttaccagaggcagtttgagggctcttagcatagcacaagtaaattatgttggttcaagtccaaggaactttgttctctttgtgtttgcttttgtagccttacctctttggggcatgagttagagacatacatgagcattttaaagtggagcagccctttctcctgggaaggagaacggaagagtccacttaagaaaaggttgtatgattgagtgcaaaatcaaaatctgacaaagcagcaataatttaggattataaagcgagcctgccatcaaacataattatgtggcatcttctggagacatggaaaatggaagaaattttcaaaaatgagtgggaggattatgttgaaaaacagtattgagtaatagcttcaggggcctcgtaaatagcatcttttcggcatcttactgggtacttttgtcatcatgaattgttaccctgaatattttcccccttattaagcagtgaaattatttacttttctccagtggtggggcagtgctaccaagttaagtaagcatctgtactctcctgtttatttggtcaggttttaaaaccatgtgtaaatgaccagtggtctctgcagtactatatattttcttaaattgtgggactctaatttttacaccgcttccttttttcttatttttattttcaagacaggttctcactctgtcacccaagctggagtgcagtgttgtgatcatggctcactgcagcctcaacctccagggctcaagtgattcttccaccttagcctcccaagtacctaggaacacaggcgcacaccaccactcacaactgactaatttttaaaattttttatacagacagggtcttgctgtgttgcccaggctgatcttgaattcctgggcacaggcgatcttcctgtcgtggcctcccaaagtgctgggattacaggcgttgagtcactgcgctcagcctgcctctcatttaaatgcaataagggcattaacttcctaagggaatcaaattgtaaatatattaaaagtggagattgcttggtatttgctcatcatgtgattaatcatcccttactgtctccaccttataaaattgcaaaccctaatatttggccaccttaaagtgggacgtgtctgtgtcttgccttgcgtctctccacacataatgagtgtagggtcctctgctgtgacagcagtggtgcctgctccagcgtgtgactctgcgccctctcttcccttacagattttggtatgacgcgagatatctatgagacagactattaccggaaaggagggaaagggctgctgcccgtgcgctggatgtctcctgagtccctcaaggatggagtcttcaccacttactcggacgtctggtatgagaacctttactgcattgccagcctggagcccccagcctctgcactttccaccagctcagtctctagggctttatctttctctgttcattgttacccgttgccagctttagctcagtgttgtgtgagccacacttcttcatcattgaggtgttcctgttgtcagtgggctagctaagggcagaagggcattcgtgggattttaaagaatttatgggaccaacattctttccgccttcagcagataccgattatgtttccaggaggtgggatgtgccagaagccgtcacctctttttgtttctcccctgcctgccttctttctcttttcctctttctcaataaacagatactgtctgtgtgtctgcctcacctaatctaaccctcagattgcagacagtgctttatttagacccaaagcttatgagtcctgattgtgttttcctgctggtcccatctgctgtctgtctttcagtgggcatccaccgttgtggacccagggatggttatgggaagcaaaacgtctcccttaatcataaacagtgtctaccagtggaagcccatcgaccgagggatcagaggcctctcagtagtattgtttattgcagttccttggcaacattgcagagaggcagtcaggttctgaaatacaactgaggttattggcaggctgaggccctggcacaggcaccttctagaatatcagctagtgtcttggctttcctctggggggatcccgttgctgttgtgttacagaaatggtagttgtttactccaacagtctggatgaccgcatagaggaactatttcaatagtgactgacatcattttttttttaacctcgtaaacctttcacagttcaggggccttggatcttattttgaagacaggtgcaaattggaaatagcatttgaatatgacccggcaaagcatgattgcttcttaagctcaagtatgagatctgttttgcaatcagcttgtccaagatggttatctcttcactgtcaaatcaaagtgctctgcatggtgtttagagattgggatggtgaggagagagcaagcctgggtatgtgcatgcatctgtttattctaggcttcgtgcctccaggagcttggaggtcagcttgtagtataataaaatagaaaactatacagccggggagaacagaagcagaatagaaggataaagtgttgttcatatctctcgggcaaattttacccaaattctgacgagcagttactgcacaagcaacaacaaagggacctagagtgtgttcattgccaattctgtccatttggctacataactactgtgaaccaatacaaaaagatatgtataaacatgaataggcgtttggtattcattccatgaaatgctcaggcattgacagcgcttcaggttttgtttgctttttaacacaggctttgaggatagcacaggtcaggaaggctagggcgttggagcaggtttctcagcggtccaggctctaaactaaagctgtccctctcaaaagaatggaaatgatttcagattgtattcagcagcacgaagcaatgattcctaaatagttaaaaatctagaaagaaacactaagaattgtattgggctttgtagaagagaccccagaattttaggatttgggatgtatccctgcagtcaggcccagtccccagtgcacctgcagatctttgacagctgctggttgagcttctgctaagaggtttccttccagggactccatgttcactgcctcacaaaggcaggccagcctcatgctttagacatccttgctcttagcaaatctttcgtgttctgctacgtcagcctctgtgtgacacccattggaccttctctctgtagcacaattgcataccttgctctgttcttgataagataggtctaggagtcatcgaagaggtgtgtctgttctagccagaacacctccaagtttcctgctgtcttccaggacttcattcccaggcccttgggcactgtggctgctctccctgcagctccctgtagcaccatgtccctctgaaatgacaagggtgccctctaggcatggaggaaaccagacgaaggactggggagctgcaccccacagcctagagctgtgcttcttcccgagcatctggatcacccaacacataatctttattttttattaagaagctttccaaatagtcacaaatagccaaggttatttgcttctttcatgactaattaccatctgtggggaatgtggatttctctgtaggttttaatttgctggtgagtgggccattgctaccatcccctcctggtgtggggaagtatagttactgaatgctgcctccagccagcacgggcattgcagggggactcacagccgccggtcttccccctggggaaacaacgtcaaggttcctaattagaaagggctttacacagagacatgtatctactgtttgaagattaaatctgtccatgaaatggaagacttgattttatatgaagtcatgaagagccaacaccacatagtaaaataccggctttgaaaaacacagaggtgttgcatatttctcggtgcttctgactggctgtgtggccttggttaaacctcagagcttctctggccttcggttgctccatctgtaaggcaaggtctgtctcgagaagtctgcggtacctgaatagatgttgaaatggctcctgtggcaactggtattgtgtagagatggttcagtgtccacaccttgcagttgtcacattaagctgtgaaggacgactgactctagcactcagtggtcctcagtggcaggtgatgttgacctcagacaagagttgctcaggagataggctttgcagttcacctcgacaagcgtttgtggagagctaggtctgctacctcctgtatcgttgcctgtgggtgatggtaaggctcttgggggtgtggaagatgcggggatgatgatgatgacgatgatgacgatgacgacgatgacagcgtcgtcgtcgtcctggtcctggaaggataaagtcttgtggagaagaggaggcaattctgacagtttggggttgcatcatcttcttcacagaagagatgaagttgtgtaggcaccctaagtatggattgtcacaaaaagagcactaggaagcggggcggggcggggcaggggtggggggttcctggcagtgggaatgctgggcaggcatggcagtagggagcacctgctgcaggtggggttggtgaggtttcctcgtgggacttaggctgcagagagatcaagacaggcctcagctgttgtattaggcatcctggactaattctttaagccctgttaaggtttctgaaccagagggtgattagagctgtgcttgaagttcttgttagccggagtatacagctgcattgagcaagatgttgtaaccaaaggagaggtggtggtgggccaggcaagcaggatcctgcacactcagggagctctgagggacggaaggagggtgccagaccttggacagatgtgagcctgggtggacagttcgcagtgggactccgaggaggccaagggcatgggtgacagcaggcagactgctcgggtggaatgggcatcagctgcagggaagccgggggaagaacagggcacaaatcggagttcagtgtgagacgcagtgagtttgtgggtagcccagtaactgggaacttggaatggagcagttgggccgggagggccagggtgggagccgtgccgtgagaactggctgcctgcaagccgctgacacagccaggaagggcacgtggggcaagaggagaagtgggtctgggagggagccacatcctcaggccatttcccagaccagcctgcagtcagcaaaagcagagagctagtcatttcttcttattttatttttaattttttgttgttggagagctagtcatttcttgtaccaagctgcatttcagatgtgtgggtactactgccactggcatctgaggcatgctgcctgtatggctgggctggttgtggaaggcagagcttcccgcacaaagctgatggagagccccttctcccctgggcccaggcctctctaaactgcacttttggcctctgggtgtcttgtacaacatgaagacgacagcatttcttggtcacttgtaattaaaaaggaccttgggttggtctgtcctctgattgctaagattctatttctgtctaacatctacttttagtatcaatttgtacaaaaatctttgattcaccgaaagtagctgaagcagcgaataaaacgttctcatacagtcaggagcactgtgggcttgggcacaaggtcaaggtcccaagagctcttggttggaaatctcctgccccaggtttttccatgtggcttgaccagcacctgcagcccaggacaggtccagctagaatccctgctccccaccctgctcccgcccctacttggtgatgagtagcctattttactccaccaaagtgaaccacatggaaaggcacacaggtcagggagaatttgtgaattacggaatttgccctgggagggcacatttgttttgcagattccagcattgtcttttttaacattctgtctgaaagttgtgtgtgtactctctgttttgttttccagtggtttgatcttctaaactggcaaagctgcatgcatatggcagaattgctcactacaaagttattcctcagccaacttctctgcttaaggattctttgtccatgataccccctcccagccagtgcagcccaccctggtccccccacctgtgacacagaggccctgcaggccagcagctccccagctctgttgtgggtgggggagcagcaggagttctcttctcccttggcccaactggacctcaagatccctatagatcttctaaacattccaggtcccaggccctcaccccagaccaatcaaatcagagtttctattgggtgcccagccctctgtttaaaaacctccccaggagattctcctgtgcagccggcagtgagaaccacctgggtagaggtttccaaaattgtctgattgtaaaaatcacctgaggagcttggtaaagcttgactgtcccaggcctcatttgaggctactaagtcaatgtccaggctggggcttggacaagaatgtcattctttttgggtcaaagccaggttaggtgataccgccttgccagataaatggccgggactaggtagatgctgaacccagtatgctctgcgttcaaagcacagatcaggggcttcctgaccgtgcaagggatgccggaagcgccctcaccaccttccttagctccaccaccggggctgaatttagtttacggggaacattagcagcaacagagggaggatgatatcccgcacttagcccagggcctggctcgctgtctgacaagcactgtcaccatagtaaggacagtttatctgctcgggatgtaagaagtgctggaaaggagggggcagcattgttcagtccatccctttccaagctcctcacagtttttttctccctgtaggtccttcggggtcgtcctctgggagatcgccacactggccgagcagccctaccagggcttgtccaacgagcaagtccttcgcttcgtcatggagggcggccttctggacaagccagacaactgtcctgacatgctgtacgtacttcctgggccctccgtgctcttctgagttctcttctcaaatacctgttttcttgggtcacaggagattaggagattaaagccattctctctggtcctgcgcctcccttgccaggcgtggctaagaggtttgtccttgtggaaggagctgagtgggttggtcgacctgtgcttttccgtgggtaccttaattctaccccatattccgtaatgctttcgttccgatttgcagttcacactgtagtttctcaggccaaatgtctctgtgaaatgtttggccagagtaatccatccttactcatcctctccatgtgaggtttttgtttctttttaaagaaggctacaacacaacacatactactctgaagtcgaattcaagagccccgcgccccacctgtggcaggcctgagggagccgccgcagtgagtgtgcacacagctgcatggccaggactccggcatgcaccacgtagggtcagcttggtgtcttctgaaccctgccccacatgtcttctctgttaagtgtttacaaaagtcataaaccatctaagtaacatgctctccggagcttcatccgctgaccaatgtggacctggagcgtgtgtgagctgacatccctgcggacagaaggatgccagtgctggtgaatttgtcttctcactgcactttttttttttttttttgagatggagtctcgctctgtcgcccaggctggagtgcattggcgtgatcttggctcactgcaacctctgcctcccgggttcaagcaattctcctgcctcaccctccaaaatagctaggattacaggcacccaccaccactcccagctaatttttagtagagatggggttttaccatattggccaggctggtcttgaactcctgacctcagatgatctccccgcctcagcctcccaaagtgctgggattacaggcatgagccatcgcacctggcaaccccacttattttgaaaaaacactttgcagcttttagtcctaagttttgtcagatgacgagagagagtttgtgatgcctcacagtgttggtgaggcctctctgctcagcgccccctggagaagccccccttttggtggaggacttgctctgtgtccgtggacggtgctgttttgtggctcagtggaggtcagagctgctggagcagggaggccttgttgtccttcctggaatgagtttgaggagggggtgaaggtgttccagttcagtcatcaggcgcacaacaggtacaggttgggagcagtggccttgcttttgacatgcactttaaggcaggcttcagagattgatctggatctccatagctgaacaggaaggtgggctcccactagtatctcaagaccaattcaggagatttccagaaatgcttttcaggacaggtttggcttcattttggaaaggatcctgaggaattgctgggctgttatgtctgcatgaaggcacccagctcctatctctcacccatccacccccctggagccagcacagactcaggctgggcccacagtggcgggataatagatagatatgaaccagacatgtgtcaggtggacaggagggaatgagggctccagcagccacaaaagttttgctcatttggtctcctacagtgtctgtgggccaggaatccagatgcaggtgttcttgctctcagctcagagtcacaggaggcagaaatcaagatgtcagtggggctgcagtctcacctgaggctcagggacatcttcaggctccttcagggttctgcacttgcaggactgaggtccccatattcttggcacctgtcagctggggactgctttcaactcttggaggccaaggccactcacagtccttgccatatacagcctccataggccctctcataacagcagcctatttcttcaagactgataagaggacagctctctactgcttctactggttttttacctgataaagtcagatctacccaggatactctctcccttttaagtgattcacagtcaattgatgagaagcctgattagaggagtgaagtatcctctcatgttcacaagtcccacccgtactcaagtgaggggattatatgggatatttacaccaggggcaacgatcttggggggcatcttagaattccatagtctcagaaatcattgtccctaatcaaacaatcaaggtgctatttttgtttcaaagcactttgagtgttgctacaaatactgaatccctaagctccttgtaaatggccggccagcggagggcatggggtggggaagactggatacacacccctgtgctctgggagtacgttggctgggcggcatgctcattagctgctgcttccgaacataggttcagctgaagtgtatcccaggcagtggacacttcgtgtggaattcagaaaggtggcgcaggaaggataccagggaaagccagagtgaaggcatcacccttgcacagctagcacatgtgggggctcccattgtcccatcaaggcagggccagaaccagaaagtcggctggtgccctgggcctgggccagtgatgggaggctcctcttctctgagggtggcacctacagatgcagtggcactgggtttcctggagccctcatcaaggaaacttcccagcatggcctcttcagaactccacaatccaaacttggaagagactcgaaagaccacttagtaccttttcttgcccagtatagaaattcttcttctccccttctgtgttagttttttatcgcagtataacaaactacccaaaacctactagttaagagcaacagtaaacatgtattatctctcagaggtttctgaaggcgaggaacgcaggagcggcatagctggctggctctggcttggagcccttctcgcggttgcagcccagctgtccgccggggctgcagtcatctgaaggcttgcctgggggaggcagacccacttccaaggtgttgctgcataggtagtatgccctgcatgaatcgccctgttctacgtgggcctctccgtagcactgcccaagtgtctcaggatgtgtagctggcttctctgagtgcagagttcggcacactctttctctaaaaggccggctaaaaaaatgtttttggctctgtgggcccatacgaccttgactgtgactactggactctgccactgtggagcaaacacagctgtgggcgtcacataagctagcgtggctgtgttccaatacagctttatttttaatactggaatttgaattccacatcatccctgtgttgtcacaaaatattcttattttgaatttcttttagccatttacatgaaaaccattcttagctcatagaccttggaaaactaggcagcaggccagattttacccacaggtacatagtttgcctgctgtgccctagagtaaaagatccaggacctgagcagaaggcacgacgtcctttctgaccaaacctcagaagtcacactgaggctctcaccttctccttcaggttacaccatgtgagagtcaatcacgtggggatgtgagctccaggacacaggggagaggaccactggggatccgggagcctggctaccccccagtaccccaccaacacacacacacacacacacacacacactgcccctcacaggtgaccatctgctccacactttgagcagcgcagccactgttttcttgccagccattatgagaaaaatcatgctttcaagtctgaatataagccatggagtaagaggtctgatgaccactgaatctgcataaaggtacagtgctagaatctaggctaatactagaactggtggtattttagcaagcttagaaacagcccatgaaagcaggtgtgagttctgcttctgtggtttagggtgggtgagggagagcggtattgttctgtgctttctctttgactcgggtaaacgtttatctacaagagacttgtgggattcttacttggtccacctccaggtgactgggcttttactattaatgtaaactgcctgggacgcagcccctgccatgggaaacgcagggcacttcctgttctcagcatagagtgacaaggaaatttactcagagcggttactctgacattcaatgtttagttcaggaggcatttctgctttgccatcgagaatttttctcccttctaagaaaatgttttctcctgagaaaatttttctcccttccaagaaaagagtagaatgaaaggaggcaacttggtttcatagggagtgtcatgttgtccttctgagtttactgatgagcttacctgagaaaggagggttctagcatgggagttctgttgctacaagacatgaaagaatggcctccgtttatcccggagaggagagtccctgagcccttgggagttgccttgaaacctctgccgggtcccaggtgagaaagtgtgtgagttgtgtggttctgagatctgaacaggcaccatctggtgacactaggggctgaaggagctcggtggctgcaggtggactggagctcaccatcaggaagtagccagattctcacccctcagtgtcaccgagtgttctggctttagaggaaggactccgtggtccccaagccacaaggtgtcgaggtctgagtctcaacgccatgactcagtgtgaattaacttagcaggtatcacaacatcagatttgggttgtggttccctgctgggtctgtactttagattgatgacaaagcccgtcctcagccttatttcagcccagatctcggtatttatgccacagatactgttgagctcctctgggtgcgtgctgaccctgaggtcacacagatgagccaggagtggccctggctttcaggaaacgtagtgacgtaaaaggtcccggctgctgcgggataagggccagggcagaggtgtgaacgcagccgtggaagacttgggccaggaagccatttgttctgctgctaacacttccacagctccacgtgtccagactgttgccagagacgtctttggtctacaggattcaggagggaatctgaactttagcctggagcattatcaactcatagatgagtctgaaacaaacttagtgaaatctgatgttttttgtagttttccagtacagtttttcccatcgctggaatcctggtttggttctgcgggaatcgagtgcttgagtgggacccagacagacaggaagggcgctcctgctcagttagccccagtaagctcactgaggcacacaggccccatgtccacagccgctcctggctgaggcgtggttcctaagacgacccttactgttgagggctgccaggagggagagacacattcagccccgcaggtcctctgggaatccggtgagcgtcggcaccgggctggggccgtgctgattcccggcagcgtgtgggaatgtgcgggtgcctcgtggcctgctgacatcgcacacaggtcacagcctgtccagttcaggacatcagggccaagagtgaagtgagaatacggaggcacctctgtgtgctcaccctgctgaccgtcacccagcctccggggggggtcacagctggcccccaggaagctgcttcccagcagggcaggaattccatttgagtcttgtccctgttccaggagaagggctgggtatgtgtcccccaaaggggagagcattcgagaaggatggcgccagcctccccagaactgacctgtggttaaaaaaaaaaaaaaaattgtgctttttaaaagatgagttttatcagctcacacatccttctagagtctaatggagattttttgtgtgtgtggaaatagtaaacaaggtcttgaatcccacagagcaaaaaagacttcctttcatgggcagcactggaagggttgttactctggaatggtttaaaagaggcgtcacatggcttgtttgtgctgatgtcactgcctcgctgctctcctgtggcacctcctcggtccctggccacagggcacagagccaagcacatctcatgctcttggcccagttacgcttctgcccaggggtaagtcagctggagaggaattcacagcccaggcatttcatgtcgttatggcctattttaatttttttaaccccaatcatttttcttaggaagtgatggggagtttggaaaggcaggcttatttgtcatcaagctgccagcttttatcaatgcaaaccacatccctgtgacatctgtgactgttccttggacagttaggtgagggagggtctcctggtggccccagggttactcttatttaggttgagaaaaattcctttttccaggatcgttggtgatcaaagtgtagtcattctgttgcgcagagaactccatcccagctccaccctcatgaattttgtaatcttggacaaattatttagtatcttagtgcttctgttccctcatctgtaacatgggggtatattatagtcagtagcacctgcttcacaaactcgtgaggacttcagcagttcacacacataactgcctcgctgcctggcacctagcgtgcacatggcattctaccgtggggtagacttttaaaattctggctacagagatacttttccataaaagtggccacatggaactctccaaatctaagaagcatactgtgggggccttcatattttgtctaattcttttctccccagaacaggaacctgcacccttccttcttttaaagggcgacgtggtaaataaacatttttagacttgcaggccacagtctctgtcctaatgtcctcagctggtagttgtagctggaaagcagctgcagcccacatggaaatgagggagcgtggccccatgccagtgcagctgatgtagaggcgggcagccccgggttaggccctgtggagacgcaggcccccgggctctagaacgctgaattctagtgaattctggatggctctccctcacacccaggcccaccctccctcaaggttgcaccttctccacctgaaggaagctgccaggtggccataggagcccttctcttggcaggccagcttccaggcccagtggcttctcttacatcaggggcctccccttggaatgttccctgaaggccagacacgggcaggtagtctgtggtcaagcagccaccctgacaggaggctagatgccactgggtgtgctttgagtttcctagatgtggagagttctgtgtggccacttttatggaaaagcatctctttagccagaattttaaaataaagaggataacttcctggtgagaacagacgtggaaaggaaggcactttggtttcacgctcatgtaagagagggctgttggcggtcactcctcagaactatggccagccctggatggtagccagctgctttttgccccaaaagtctgtttagctgggtctctgcattctggaagcttgtcaaagcccgggcctttcctgggtcagggcagccggctttccttgtccacgtgtggccggctgttttcttggggagccccggccacagccggcaggactccctttgctccatgtgactctgagggcctcacaggtatttgcagcccaggtgctgtcggagcccagccgatgcgaccgacacacagcacaagcgtcatcctgttctgcctgtcccttgcgtgtggaggggactcgtgcccagggctctccttgctggcttgttggaatctggcttcaggtctacacggggcctctcgtttggtccagaacagcctggctcatcggctggggcttgcttgtgcagggctggagcgagcacgtgctagatggagacagcagactcggagtgtgcatttcttcgtgttgcaagcctggcctcacagtgccttcttcctttggttgtctgccaggggtagccctgcaccaggaggaagcttagaaatagcacaggtgggaaccggagagagagcactgttggggaagctgcggtcactcatcagccttcctggtgagaaaccaggggtttcctgctaattctggaaaggatgtttcagcagtgcctgcatgagacgcctcagatagaaaactggttatttttgtttcttagcactgccaccatagataacagctgtcacgatggacagtgtggacctggattagtccttcttgggaaaggagagtttgggttttgtaccgtggtggttctgggttctgggggaagagaatggaaccgtacgaggtaaaacaggagactctgaaggccacttggccatccaggcagaaagccagggatggagaggggcagcagggctgtgttcagtgctcccgccgtacgcttgtatgcgggaaaccactgcaggcggcccatgaagcctcctggccatgtgcgccctcccggtttggaccccctcccgtgtgtcttggctgcaggtttgaactgatgcgcatgtgctggcagtataaccccaagatgaggccttccttcctggagatcatcagcagcatcaaagaggagatggagcctggcttccgggaggtctccttctactacagcgaggagaacaagctgcccgagccggaggagctggacctggagccagagaacatggagagcgtccccctggacccctcggcctcctcgtcctccctgccactgcccgacagacactcaggacacaaggccgagaacggccccggccctggggtgctggtcctccgcgccagcttcgacgagagacagccttacgcccacatgaacgggggccgcaagaacgagcgggccttgccgctgccccagtcttcgacctgctgatccttggatcctgaatctgtgcaaacagtaacgtgtgcgcacgcgcagcggggtggggggggagagagagttttaacaatccattcacaagcctcctgtacctcagtggatcttcagaactgcccttgctgcccgcgggagacagcttctctgcagtaaaacacatttgggatgttccttttttcaatatgcaagcagctttttattccctgcccaaacccttaactgacatgggcctttaagaaccttaatgacaacacttaatagcaacagagcacttgagaaccagtctcctcactctgtccctgtccttccctgttctccctttctctctcctctctgcttcataacggaaaaataattgccacaagtccagctgggaagccctttttatcagtttgaggaagtggctgtccctgtggccccatccaaccactgtacacacccgcctgacaccgtgggtcattacaaaaaaacacgtggagatggaaatttttacctttatctttcacctttctagggacatgaaatttacaaagggccatcgttcatccaaggctgttaccattttaacgctgcctaattttgccaaaatcctgaactttctccctcatcggcccggcgctgattcctcgtgtccggaggcatgggtgagcatggcagctggttgctccatttgagagacacgctggcgacacactccgtccatccgactgcccctgctgtgctgctcaaggccacaggcacacaggtctcattgcttctgactagattattatttgggggaactggacacaataggtctttctctcagtgaaggtggggagaagctgaaccggcttccctgccctgcctccccagccccctgcccaacccccaagaatctggtggccatgggccccgaagcagcctggcggacaggcttggagtcaaggggccccatgcctgcttctctcccagccccagctcccccgcccgcccccaaggacacagatgggaaggggtttccagggactcagccccactgttgatgcaggtttgcaaggaaagaaattcaaacaccacaacagcagtaagaagaaaagcagtcaatggattcaagcattctaagctttgttgacattttctctgttcctaggacttcttcatgggtcttacagttctatgttagaccatgaaacatttgcatacacatcgtctttaatgtcacttttataacttttttacggttcagatattcatctatacgtctgtacagaaaaaaaaaagctgctattttttttgttcttgatctttgtggatttaatctatgaaaaccttcaggtccaccctctcccctttctgctcactccaagaaacttcttatgctttgtactagagtgcgtgactttcttcctcttttcccggtaatggatacttctatcacataatttgccatgaactgttggatgcctttttataaatacatcccccatccctgctcccacctgcccctttagttgttttctaacccgtaggctctctgggcacgaggcagaaagcaggccgggcacccatcctgagagggccgcgctcctctccccagcctgccctcacagcattggagcctgttacagtgcaagacatgatacaaactcaggtcagaaaaacaaaggttaaatatttcacacgtctttgttcagtgtttccactcaccgtggttgagaagcctcaccctctctttcccttgcctttgcttaggttgtgacacacatatatatatatttttttaattcttgggtacaacagcagtgttaaccgcagacactaggcatttggattactatttttcttaatggctatttaatccttccatcccacgaaaaacagctgctgagtccaagggagcagcagagcgtggtccggcagggcctgttgtggccctcgccacccccctcaccggaccgactgacctgtctttggaaccagaacatcccaagggaactccttcgcactggcgttgagtgggaccccgggatccaggctggcccagggcggcaccctcagggctgtgcccgctggagtgctaggtggaggcagcacagacgccacggtggcccaagagcccctttgcttcttgctgggggaccagggctgtggtgctggcccactttccctcggccaggaatccaggtccttggggcccaggggtcttgtcttgtttcatttttagcacttctcaccagagagatgacagcacaagagttgcttctgggatagaaatgtttaggagtaagaacaaagctgggatacggtgattgctagttgtgactgaagattcaacacagaaaagaaagtttatacggcttttttgctggtcagcagtttgtcccactgctttctctagtctctatcccatagcgtgttccctttaaaaaaaaaaaaaaggtattatatgtaggagttttcttttaatttattttgtgataaattaccagtttcaatcactgtagaaaagccccattatgaatttaaatttcaaggaaagggtgtgtgtgtgtgtatgtgtggggtgtgtgtgtgtgagagtgatgggacagttcttgattttttgggttttttttcccccaaacatttatctacctcactcttattttttatatgtgtatatagacaaaagaatacatctcacctttctcagcacctgacaataggccgttgatactggtaacctcatccacgccacaggcgccacacccaggtgatgcagggggaagccaggctgtattccggggtcaaagcaacactaactcacctctctgctcatttcagacagcttgcctttttctgagatgtcctgttttgtgttgctttttttgttttgttttctatcttggtttccaccaaggtgttagatttctcctcctcctagccaggtggccctgtgaggccaacgagggcaccagagcacacctgggggagccaccaggctgtccctggctggttgtctttggaacaaactgcttctgtgcagatggaatgaccaacacatttcgtccttaagagagcagtggttcctcaggttctgaggagaggaaggtgtccaggcagcaccatctctgtgcgaatccccagggtaaaggcgtggggcattgggtttgctccccttgctgctgctccatccctgcaggaggctcgcgctgaggcaggaccgtgcggccatggctgctgcattcattgagcacaaaggtgcagctgcagcagcagctggagagcaagagtcacccagcctgtgcgccagaatgcagaggctcctgacctcacagccagtccctgatagaacacacgcaggagcagagtcccctccccctccaggctgccctctcaacttctccctcacctccttccctaggggtagacagagatgtaccaaaccttccggctggaaagcccagtggccggcgccgaggctcgtggcgtcacgccccccccgccagggctgtacctccgtctccctggtcctgctgctcacaggacagacggctcgctcccctcttccagcagctgctcttacaggcactgatgatttcgctgggaagtgtggcgggcagctttgcctaagcgtggatggctcctcggcaattccagcctaagtgaaggcgctcaggagcctcctgctggaacgcgacccatctctcccaggaccccggggatcttaaggtcattgagaaatactgttggatcagggttttgttcttccacactgtaggtgaccccttggaataacggcctctcctctcgtgcacatacctaccggtttccacaactggatttctacagatcattcagctggttataagggttttgtttaaactgtccgagttactgatgtcattttgtttttgttttatgtaggtagcttttaagtagaaaacactaacagtgtagtgcccatcatagcaaatgcttcagaaacacctcaataaaagagaaaacttggcttgtgtgatggtgcagtcactttactggaccaacccacccaccttgactataccaaggcatcatctatccacagttctagcctaacttcatgctgatttctctgcctcttgatttttctctgtgtgttccaaataatcttaagctgagttgtggcattttccatgcaacctccttctgccagcagctcacactgcttgaagtcatatgaaccactgaggcacatcatggaattgatgtgagcattaagacgttctcccacacagcccttccctgaggcagcaggagctggtgtgtactggagacactgttgaacttgatcaagacccagaccaccccaggtctccttcgtgggatgtcatgacgtttgacatacctttggaacgagcctcctccttggaagatggaagaccgtgttcgtggccgacctggcctctcctggcctgtttcttaagatgcggagtcacatttcaatggtacgaaaagtggcttcgtaaaatagaagagcagtcactgtggaactaccaaatggcgagatgctcggtgcacattggggtgctttgggataaaagatttatgagccaactattctctggcaccagattctaggccagtttgttccactgaagcttttcccacagcagtccacctctgcaggctggcagccgaatggcttgccagtggctctgtggcaagatcacactgagatcgatgggtgagaaggctaggatgcttgtctagtgttcttagctgtcacgttggctccttccagggtggccagacggtgttggccactcccttctaaaacacaggcgccctcctggtgacagtgacccgccgtggtatgccttggcccattccagcagtcccagttatgcatttcaagtttggggtttgttcttttcgttaatgttcctctgtgttgtcagctgtcttcatttcctgggctaagcagcattgggagatgtggaccagagatccactccttaagaaccagtggcgaaagacactttctttcttcactctgaagtagctggtggtacaaatgagaacttcaagagaggatgttatttagactgaacctctgttgccagagatgctgaagatacagaccttggacaggtcagagggtttcatttttggccttcatcttagatgactggttgcgtcatttggagaagtgagtgctccttgatggtggaatgaccgggtggtgggtacagaaccattgtcacagggatcctggcacagagaagagttacgagcagcagggtgcagggcttggaaggaatgtgggcaaggttttgaacttgattgttcttgaagctatcagaccacatcgaggctcagcagtcatccgtgggcatttggtttcaacaaagaaacctaacatcctactctggaaactgatctcggagttaaggcgaattgttcaagaacacaaactacatcgcactcgtcagttgtcagttctggggcatgactttagcgttttgtttctgcgagaacataacgatcactcatttttatgtcccacgtgtgtgtgtccgcatctttctggtcaacattgttttaactagtcactcattagcgttttcaatagggctcttaagtccagtagattacgggtagtcagttgacgaagatctggtttacaagaactaattaaatgtttcattgcatttttgtaagaacagaataattttataaaatgtttgtagtttataattgccgaaaataatttaaagacactttttttttctctgtgtgtgcaaatgtgtgtttgtgatccattttttttttttttttttaggacacctgtttactagctagctttacaatatgccaaaaaaggatttctccctgaccccatccgtggttcaccctcttttccccccatgctttttgccctagtttataacaaaggaatgatgatgatttaaaaagtagttctgtatcttcagtatcttggtcttccagaaccctctggttgggaaggggatcattttttactggtcatttccctttggagtgtagctactttaacagatggaaagaacctcattggccatggaaacagccgaggtgttggagcccagcagtgcatggcaccgttcggcatctggcttgattggtctggctgccgtcattgtcagcacagtgccatggacatgggaagacttgactgcacagccaatggttttcatgatgattacagcatacacagtgatcacataaacgatgacagctatggggcacacaggccatttgcttacatgcctcgtatcatgactgattactgctttgttagaacacagaagagaccctattttatttaaggcagaaccccgaagatacgtatttccaatacagaaaagaatttttaataaaaactataacatacacaaaaattggttttaaagttgactccacttcctctaactccagtggattgttggccatgtctccccaactccacaatatctctatcatgggaaacacctggggtttttgcgctacataggagaaagatctggaaactatttgggttttgttttcaacttttcatttggatgtttggcgttgcacacacacatccaccggtggaagagacgcccggtgaaaacacctgtctgctttctaagccagtgaggttgaggtgagaggtttgccagagtttgtctacctctgggtatccctttgtctgggataaaaaaaatcaaaccagaaggcgggatggaatggatgcaccgcaaataatgcattttctgagttttcttgttaaaaaaaaatttttttaagtaagaaaaaaaaaggtaataacatggccaatttgttacataaaatgactttctgtgtataaattattcctaaaaaatcctgtttatataaaaaatcagtagatgaaaaaaatttcaaaatgtttttgtatattctgttgtaagaatttattcctgttattgcgatatactctggattctttacataatggaaaaaagaaactgtctattttgaatggctgaagctaaggcaacgttagtttctcttactctgcttttttctagtaaagtactacatggtttaagttaaataaaataattctgtatgcatttctgtctctggtttggttttgtccctcctggaagcatcactacactttggtggcagggaagctgagctatgtggggcacgtgtgttcacgcatgttgcctggaagcgttctccagaaaagcattgcctcttctctgacagctgagctttctcagcatgcagattgccagtaaagacgacagggaagctatctgtttctccctccattaaatcatctggaaagaaatttgaatacataaattacgaaactctgtactgcagttccgactgatttgtagacttttttcctataccttccactaacaacagtcaggccaaggcaagtctgatctgcatgaccccaaggcagaggacttcagttcttcacatttcccatgtgctttttggtctttcacagctgacatgcccacctcggggggatgctggtgagaacccagtgggcctcacgcagaatgtgggtcactggaggagctccaaagtcctagttactttctagctgctgctcagtgatctctgtctgcccctagggaccctacaatgtaaacattatttttgtcaggggaaatggcatgtatggcaaggtgtgttctagaatcagactaaggattcagacacatcaggcagagaagctggtcatttccttcaactttatcatgggaaattatgctccaatagcaaaatcgggccagtagaagaagagctgtccagcaatgtataggtagaagtaaaccgaagaccatggttacttcagacctgttgagcctcagaagtgtttgcacctaaaagcaaaggcctttctgaaaggggactctcagctggggtgcggtggctcacgcatgtaatcccagcactttgggaggctgaggtgggtggatcacatgaggtcaggagttcaagaccagcctggctaacatggtaaaaccccatctctactaaaaatacaaaaaattagtgggacatggtggcgggtgcctgtaatcccagctacttgggagggtgaggcaggagaatctcttgaactcaggaggcagaagctgcagtgagccaagattgtgccactgtactgcagcctgggtgacagagtaggactctgtctcaaaaagggtactcaagcttggcattgcttcagggttactgctcagtgttgtcaccgagtgcctggcactcaggggatcttcattaggtgactgatgatgaggaggtctcaattctgaggctggaaagcccaacagggcctcctccttccctggtcaggtagatgctgcccttccaggttgccacagtgcagtctgcacttggcctgcccagccagaaggagcagcaatatctaaggatgaaggtgctgggtcttcagaagcattagaacctttcccctccaggccatttcttaagactgcaagccctcaagagctatttctgcatttaccccccaagtccaggtatgagtccatactcactcagatgtgtgatttttgtagtgttctaatgttgctaaaaag

SEQ ID NO: 276 - DNA, 61733 bp, Homo sapiens
  source 1..61733: mol_type = genomic DNA
cgccatcccagcctccgccgctagaaactcgttggcctcgctcgccgctccgccgtggagccggggcttgcccgtggaccgcgcgtcccgctctccgccgcgtatccgggactccgaaacgcgcggcgagcagccccctcccccaccgcccagacggggtgcgaccgcccacgtgtcgccccttgcccagtcgggtccttccctcgggctccgggagccggaggatccggaatgagttggtcaaagccgagggaagggacccaggcggatccgcttccccctccccaggaacggcgggaggaggaggggagtggccgccgccccctcccctaagctcccgcccctcgcttccccgtgcgcggagcggaaattaccccctccccccgcgggtctgacctggggacgtgggcggggcttcccgcttagccccccgccctccgtccctctcccgccttcccgccaggatcggaatcctgcaccccaaacaaagttccgagacccgaacctagggcctagagagctgccagcagtgtcccgggtggtgcaggctctggaaactccacctgtctgtccccgactctgggagggaaaaggggaccattcaaatctccacccggtcactccctccctaagacctcccccttcagttcgctccggttagccctagctatcactcctcttccttgtctcccaccgttcctgtctcctggagtcatctccggccagttccgcgtgttcccctcaggaccccgaaacgttatcatttaacagccggaccccgggtgcgaaccaccctttctcccgtggggatctcaaaacattatttcctgcggcttcctcgttctccactgggataccccgttcccagctttccagtcccgcgctcgcagggtcccccggtcctgcatccccggaggcgggggagtttcgtggggctggcgtggggaaggcggagaccccccccatttaaacatctagggaaaaggttcctttctttttaaatcaccagctcgtgcgaccctctcctgaagaccccagagtcttcggcttctctttgtctgtctcggccgtcccccgcctgtcagtcgctagcagttaaccggggaggggtgagcaaccccgccccccaaaacgaatgaaaaataaccgtacattttaccctttaagacatgtgagatctgggctggaccatcctcccccagtttgggctggggtagggggatgggtgggggcggggcgcttccctaggggccaggttcttgcaaagggggaaggggcctgtagagcttcagggacgctgccgcaccgccccagtttaccccgggggtgagttgagttccccaccctcaggcgggagattatcgggtttggccggagggccgaggggccctgtggcgtcgggggtctttccctgcagggtgggtgggggctgtcaccacgtggcttctcctttttttttttttttttttttccgctccattttttttcaagtcgattttatttagaggcggcgccagggcggccgcggagaaacgtgacacaccagccctctcggaggggtttcggaccgaagggaagaagctgcgccgtgtcgtccgtctccctgcgcgccgcgggcacttctcctgggctctccccgaactctcccgcgacctctgcgcgccctcaggccgccttccccgccctgggctcgggacaacttctggggtggggtgcaaagaaagtttgcggctcctgccgccggcctctccgcctcttggcctaggaggctcgccgcccgcgcccgctcgttcggccttgcccgggaccgcgtcctgccccgagaccgccaccatgaacaagctttacatcggcaacctcaacgagagcgtgacccccgcggacttggagaaagtgtttgcggagcacaagatctcctacagcggccagttcttggtcaaatccggctacgccttcgtggactgcccggacgagcactgggcgatgaaggccatcgaaactttctccggtaagaacacagccacctcccggaaaagccacaacgagagccccgaacaacggagacccgcaccttccggttcctctcccgccaactcctctcttcccgggcctgcggggtttggcctccgtacccaccctcgacctacccccttcgatgccccctccctcgctctgcgcctcccacccccgcgcagaaacattcgggatttcctcatccctttctcccagcctgagataaggagctctggcttcccccatccttcctccccaccgacggggcgggagcccccactggcagtagtggggggttgaatttagggacacggggatgacccctggctgggcgttatttccacgcccagcccctccctatccgccggtggacgcccccccagctggaaaaccccggctcccgttcctcagtcttaggcctttccaggcgtggaaggggtacccggaccgcctgcgatctgtccgcttcgcgtggggaatgcagccctccagcaggacttgcaaggaagggggtcttgcctcccgcccagggcctggggcttgagccattttgatttgaaagtggggcgtgagcggggtggcgcggcggcggcggcgccgggtcgccatgctgcttcccgagacgccgaggctgggccgagaggcgcgcgcggtggcagtgagggaccctccccgccaggccccgctccgctcccccaggtccaccccttcccaaaccagccccgacaggtgaccgctccgtggcccaaagcccgtcttcctggccaacagagaaaaataaagtttcattctgcacactgcctcccgccccgcgccccactttctgaggaacggggagccctttctttcctggctccttcccacatctgggagctgtgtaggcagcgcacccacacaaatggcctcgcacctttcccaaatcgggattccagagcgatccactcaacaagcctcagtgatttaataaagcaaaaattaaaaaatgaataataacgaatttacagactccaccattcctagagcaacctttttcccatctggatgcggaagccactgcctggattcctaggaagatctcgaatcccagtaactcctgaattatcctagtgtcttttccccttcctcttcccacccccaacccctgttcaagctctcatggtaattttttttttttaatctttagggaaagtagaattacaaggaaaacgcttagagattgaacattcggtgcccaaaaaacaaaggtaggaaagagctcttttcggggggggtgggggggccgcgggggtgtgctgtgaagctgtgttcaggggtccatagcgtctccagtggaagaaacccattactggtctttcccacccccaactccggatgttgggggcagggagggaagattggccaagatcttgtaatgggtggtttacagcttgtaaaaaaaaaataaataagttggggctggggtaggctaaaagatgttacttgcagaattaaaggggaaagaaaatcaataggggagaaaccttgtggagtttgtttgttcaactcgtggggccgttttttgtgggggaaccttaaaatctttgaagagttcagactcatggcgatttctgcaacttcgtagcaggcctcattttctgtttttcccactctttccacaccataattcttaagtggattgcccttctcccgaagcgatgtggaatgagtttcccggcccccaaagaatccccttatgcttgtactttatttatatttctacaacaggcaaagactttttattttccatggaccccccacccccaatccctcatatctcacatcatccctctccccagctggattttccaaagaatatgccttggctgtactatccttttcgagcccccctacccccactccttcagcccattgttaccaggggaccatctggggtgagagctttgtgttgaggctgtgagctggggctctttggagggtctagaactccgtggatgaatggtgtgtgtgtgtgtgtgtgtgtgtgtgtgtgtgtgtgtgttcgtgtgtgttccaataccctctatcctctctcttcagcaaaatggggtacctccatcatacttaccgagaattcatggtggatttcaaatcttgcattgaactctgaaacctttccttgaactctggctgggaagtataagggcagagtctttctactttctcaaatcagactttaaacatgttgacagtgtagagtttgctctcatgtcccaagctggaaagcagcccccagtaaatctttgatcttcctcaccccccatttcagctgaaaacttggtacatttcaggatagtctctggccttttccgggtagatgggagatgatgactgctttttctgggggaccattaagagggcctagaaagtttaatgtgagataaaaatctgttcagttgcttagcttgatatttaagtaacttggaactattgtgtctatagatcaatatggcttgttactatgtttatagagcttgcgatttaacttcacatgtttgaaataccgtgttattggaaaggcaattagagttaggagtaaagaggcaataaaatgggaaggaagaaaagaagtcttatttgttattttgaaacattttctggagatgtgtctaaggaacatacactgacaccagcaggtttattgaaaaggatatggatatttgaactgaaagctgagtgttgatgaaaaatatccagaataagtggaattctaaaatatgtggattttttcttttgctcttgaggatggtttaaattttagggaataaagtgaaaagcaagagaaatagcaaaacgtgatgaaatggaactcaaaacatttatattttaattttcatggtgccctgtatttatgaatctttttccccaagccatctgcttgcttttaagtcatttctaggccctttttccctccaaaatgcattactgagggctcttttttgagttggaatggagagggggtttgtgagaagactgggtaaaaaaaaaaaatctgtccacacccatattaaattagatcttttatgtgttctccccttcctgaaataatttttttagcccaaacattgagtcagttgtgttttctttgctttttattttggttggtggtgagaaggcacttcatttttctagaatgaatcaatttttgaagtctcaagatttaaaaaagaaagtttgttttcattaagtcagtttgctctatcattttgtgtctttgaggaagtatgttgtggtatgtgtctttagtctgtgtctgaaaagtatttcgtcagttaggtttgttactgactttccatctcatggatgtatagaacaggaactagttaattatgactaatatattctaagcaaaatgaacaactatacaaataatattttgtgtatatatactcttgtattttccttatgaactcttcttgaggcattcagttccaaatgaactatgatttcaatttctaaaataattcataaaaacccaacaactaaatgttcctggttgttttgttttgttttttaagagggggaaatcaaacaaaagatatgctgtagcaatacctcttaatgtattttgttcttagtttgaatttatttgatacatataatttgtacctttttaagaactcaagaggccgaacactatgcatttcaactgaaaacagcagttagcttgaatttttaaaatgaggtgatactaatttcttagagatcaccatctcaaacccccttagtgttggaatttggttaacaatttgtgcttttttgttgagaatttgtatatgttcactgccagatactgagacaaaagagaaaaaccaaatgcatttaaaaacagttgtggaaagggcttgtatatgttttattctgagagacttaggagtagttgaggtaaagggggtaccattttagtgtgacttgattactttgagacatgatttgctttttaagggaattaaacctttgttacacttgccactgtggtgtgcctttttctagaggaatgtgacctaaagatagcatattcactgtcaactggtgtcatcaaaataaaaggtgttactgttaattaagaaaaaaatgaaagagatgcactgactcattttttttaaaggtgaaatgtgttcacattaaagaattctaagtttggtgatttctttaggcagattaatggtccttttcctctatgttgactaaaaatgaggtgggctaactcccttaagtacctattaaacaaaattagttttataaatcgttcataaaattgagaactcccaaaagaaagtgtccaaattttacagtttaattttttgaagttaacagctttaaaaatctgtgaagggatgtcttataaatggcaaaaaatattttaaatatattttaacaatgatttgttgaggctctgaagaaatcacttggatcactaaatgttttcaaaacaacctaaaaattgtcttcagaaatggatttgcacttaaggaaaaaagaaaacctaccttgtactttggggctgaaaatgaatgaagaggggttaaaaagggaatgaaaactactagagcgggagggttttcaggcacttttactttaatggttgtaattatgaattagtatccaagtcaaaaagaaagtttttaactcatacgaggtaaaagataacatgtgactactattcaacatggaagtttaaagtagaaacaattgattactcttttaaaaaggttttcttattaatattaggttagaattttttttttttttttgctttacataagtgaaaaaaatggttgaatgttaagtttttgtgcactgtttggaggaaaggtggaaactggggtacattctttccctattttaatttccacctaaaaattaaactttgcaaattcataaattagtttccttcactgctggtagaaatccttaactgttctcatttgggtggtcagtatttcaagatgagagttttgtaagggcagtggcaactgactgtcccttagaagaattgtaggtttctagaaccccttattttctgacccaaattaaaaagatgaaattttaccataatggtttctcagatggagaactttttagtaaaaagggggaagaactgcaagtcccatcactaatttattcaaagtattgttaattgttgaaaaggtaaagttttaatggcacagcttttggtggaaaaaaacataattatgtttcagagattaaatacatgacattagcaattggaagaaccttgattcaaaggttctgagcttctaatcttttaaaattaccttaatatgtatcattttaatctatgtgtgtgggtacttttaaggcttactttttaagagtgtatttatactatactttaatgtgtagcagccagttgacaaagatactattgaggtagtctactgagtatacaattttaaaacattttaaaattcagatctggtttagttgagtgagaagtggggaacagcaagtgctatttgttgaagtttaaaggttttgtgaagagttatttagtggttagatctgttgatttttgtgtgtggggtggtagtggtggtgatggggttgttagaataagtttatgaaccaaaggcatttgaagaacggacattttcccagctgttagaatttaaaataagtgtggttcgttccctatcctcttaaaagattcttgaaatgtggctaatgttttccagaaagtgcagcttagaatttgggatgggagtgttagggagagaaaaggggaggaaaaaagcagcagggggagactggagaaatcagacgagttagtcccggcttggaaattccagacggggaggggggagggagagagggagggaggggagatacggggttgggtggatttcccgcttcccttttaaaggggagcggctggagtctcacagtgttacccacgggagaggggtcggagacgggtggtagactcagctcagggcaaggctatatttgcttttggagttgccggccttcccttcccctttcaaaaaagagagagagtagagagagagaaagtggcggcggcgctgcaggctcttcctggagcgctcgccccggcccggcggccctaaccttccccgcccgcccccgcgccagtcccagcccggcaatctcgtctcgctctgaggtggggccgcccgcctgccttctcttaacaagcccctgacagagaacatccgctggcctgggtctccgaggaggacttcccctctcagatccctgagaccccaggagatcccaggccgcttgtggtgcgccttagtcctgggaaccccagatcgcaaacctcgcagcagataccccacgagagggttccccctcaccggctgcgggctgcgggctgcagaccctttccagcacctgggctgcctcaggagctctccattctaaggcaaaaagccagtgggtaaatgtgaagtgaaaagaggcaagaagagaggaagagtaggtaaagggaaaataggatgagacagttggagagaaaatggaagtgcaagtagctgttcctctctcccagtagctggggtcttggcctgagaaatagaaccttaaagagttaagtgtcaatttaagtaacctgcaatctttacaaaatgagctgtttgtgtctgtccacaggtcctgaaggctgaccgaaacaataacagaggcagtaatagtagtcagaggttctatccatggattttgtttatcttgtaaaagagagacaacaggccttccagttgtccagggtctcagccagtcttcgactccatgttagtgtaaaacttctgcaccccatccatttccacctttcctctcctcccctatacctttttaaatgcctgtcaaaacaaaaagcagaaggaaaggtctctcaaacctgtactcaagaaagtgtatgcccatttggttaccgatagtttggttaaaaatgatcctgtaagataccacctgacacacaccatcgcaagggcaaggaggcaatgccagcaggaagctacgtagtccccaggtagtgacttcattctactaggagaacttggatggcccttcagattttgatcagaggagactatgtacttattactggatagaaggggggtcatcctactattaaaatttattgcagagcctgctttgtaagacctgcttactaccttgcagcacagtaggtttgcaataatacaacaggctggaacaaacttttgctctaaccatagttgactgacaaaatatatgttgattacaggtaagtcacagaaaagtaggtttggacctcatacttttaatacagttggaaaaaacctgattgcaacacactgaaatgtaactgtgtgcagaacaaacaccatcagaaatgcagtccttttgcattttgggaaatccaggttcccaggagcatggctggtcgtaagcaaactgcttttgactgaaatagagagcaaacagctcgatgattaagagaagttttgagtggattgtgcagatattttcaagaccccttaggacaagtctggttattagacaagtggcattttggtggctggaaggcatgtaagggatggtgtctgatatgggatggctggaaattttgcttatagtttagaggagggttgtggagaaaaatcccataatagaggaggcaggagaagaggggaagctctacattttctctttccctttctaccatgtctggttagtggattctagtcaatcctctctacatttccttatgaaaagaaggttaaggagaacttcaaattttttttttttcattttgagttaattttggttaaaaactcaatcactcattcaggacaggcacggtggctcacatctgcaatcctagcacttctggaggccgaatagggcagattacatgaggccaggagttcaagaccagcttggccgacatggtgaaaccctgcctgtactaaaaatacaaaaattagccaggtgtggtggtgcatgcctgtagtcccagctactcgggaggctgaggccagagaattgcttaaatctgagaggtggaggttgcagtgagccgagatcgcaccactgcactccagcttgggtaacagcgagactgtgtctcaaacaaaaacaaaaaccaactcaatcactcatttggatgttttggccacttgaaatggaaaatgttaagtctgagtgaaatttgattggatagtttagtttagttgattggatatagttaggatctttaaggggagaaatcagagaattcagaaatatgtgtgtaatggttgtttgtgtggtctgacctctttggcaaagaggaacaaggaggaaaggaatcattcaaaattcttaaggctccaggagggaagaagtgctgttaggtcagagtcttaatgacctaccctaggtctctcactcatcctttactggggtctggaggaaaggtcttcctcccaggagaattcagtgtttaaaagcttgagctcaatttccgtaactgtaaagaagtggtcctaatagtagtacacaatagctcttattgttattattttgttgtagatattgacttctgtccctcctgccctagccattgtttgtcctcctttgaagctttacagttgtatcctaccctgccccatatagctgtggttagctccatgagtattagaactgatcaagtgtacagatgcctgaaaatgtgtccatgagaggttgtctttgaactgtgtgtgtgtcagcttgggctatatatctaaggcactaggaacagtgatggctaggcatgttgaaggggatctgtgcgtagggtgctttggtaactctacctgtatgttgaaaggaaaagccaccttttagtggagagagatgaagctcaccagggcaaccccacagagcccctagattatagattcccccagtacattctctgagacagaggcttggagagatgaggcgagcatggtggataatgctattaattgttctttaggggaaacaggccatttattctgttatcgtttatgccctgaacttggtccaggttcctagctgaaatttcacactttacggctactgtcaaaggtgtacatgtagagtagggacattggtgagaggggaactaactctgcatataaggtaggtgttgtaagaattcaggatgaaggggactgtaagaatcctcctgggggtctgaggaaggaagaaatgagagtgacctcccccatctgctgggatgggtatgttcattttcatgtcctgctcttggtaagctaacaaagtaggcattcaggaactggggatccctagatacccagggggtgactgcacacattgttccctacttcttctgcttctgtagtgtcctcacattctccccctggttccctggtctggaaccagttcccagagatgcactcagaacccacctttatgcccacttcttcatttcagccctctgctcaaaggctgcgtgccataatgcaggcacatgggtgggtgcatacacatacatacacacacgtccatagccccagccctcggaataagggttgaaccttcttactgggatggggaggaaaagggcttcccatccggatgtggttttcagtcttttaacaggcttgtgactttaatcatttactataaagggttttacaattagtttatgcagaatgatgtattgcctctttctggagtggcatttgggattgcttggggctcgtcaactttccattcgggactctgaggaagagaaaatgagggagacaggaactgaaatgggagctgttgggtggagtaaacttgttgaggatgtctattcaaagttagaaatatttattctacttcctccttaaggtctctaagttgcttgggaggagaactccaactgtaatagagaccagttgctttggcaggatttggagatgaagttctaaattaaagggcaggccaggcgcagtggctcacgcctgtaatcccagcactttgggaggttgaagtgggtggatcacctgagatcaggagtttgagaccagcctgaccaacatggtgaaaccccgtctctactaaaaatacaaaaattagctaggcatggtggctggcacctgtaatcccagctacttgggaggctgaggcaggagaattgcttgaacccaggaggcagaggttacagtgagcagagattgtgccattgcagtccagcctgggtgacaagagtgaaattccatctcaaaaaaaaaaaaaaaagtaaataaattgaagggcaaagataattcttcacagagagatatggctgttggtggctgcagccagtgtattccaaacaaggactagatgtactaggatgttggctgaggaagcagctagattcagaagaataatcttgttaagggtcttcctacaacttatttaaacttatttaaaatctagctgactgaggttatctatagggttttcttcctctctatatttattaccatttggttaagatatgctgctgctgttggctttttagaatagagtggagtgattgctgtccagaatgagctctgggtgtaggcaggaggtggaacagaatgatcttcacaaacctctaatatttctgtgagataatctttgttccactcttctaccctttccctcttgctggccatcttgaatgagtagtttcttttaaacttctaactaaaagaggaatgctgtctgtctaggcccaaactcctttgctctcttctcttaaaagccccatggttagcaactgtagcctgggagtgtgtgtggggtccttgcctcagtcactggctgtttgaaaaataacttaaaaaatatatatttacaatgaaatgccatgggagaaaacatttaacaagatgctgcagacgtctgggatagcttgcatattgctgcaaagattggtacttctgatgtattcattcatgcatgcaggcatgcattcatccagttatttttatctagtaagagtctactattgcatgatatgccctttgctaggtattagaaatacaatgaggaacaagtgaaagaccctgatcttacagtgcagatggaaggaaatacaatttttttttgtttctgttttttttgagagggagtcttgctctgttgcccaggccggagtgctgtggtgccatcttggctcactgcagcctctgcctcccgggttcaagcgattctcctgcctcagcctccccgagtagctgggactataggtgtgcgccagcacccctggctaatttttgtatttttagtggagatgggggtttcaccatgttggccaggctggtctgaagcacctgacttcaggtgatctgcccacctcaacccccaacaaggtgctgggattacaggcgtgagccaccgtgccctgctggaaatataatttaacagatatttcagatattttctctttggaaacttaggtttttctctttatccttggtattttttttaaaaaaattatttttaggctgggcgcagtggctcatgcctgtaatcccagcactttgggaggccaaggcgggcagatcacttcaggtcaggagttcaagaccagcctggccaacatttgaaaccctgtctctaataataatacaaaaattagccgagcgtggtagtgcatgcctgtaatcccagcaactctggaggctgaggcaggagaatctcttgaacctgggaggcagaggttgcagtgagctgagatcgtcccattgcactccagcctgggcaacaagagcgaaactccatcttaaaaaaaaaaatttaatcgtaaaatatgcaaaaagctaaaatttaccatcttaaccattttaagtatatagttttgtgacataaacatacctgggcgcggttgctcacacctgtaatcccagcactttgggaggccgaggtgggtggatcacctgaggtcaggagttcgagaccagcctggccaacatggtgaaaccctgtctctactaaaaatacaaaaattagtcgggcgtggtggcgtgcgcctgtaatcctagctactcgggagtctgaggcaggagaattgcttgaacccaggaggcggaggttgcagtgagccgagattgcgccactgcactccagcctgggtgaaaaggagcaaaactcgatttcaaacaaaacaaaacacaaaaaacaaaaaacattcacattgttgtgcaaccatcaccttcatctatcgctagaactcttcatcttgcaaaattgaaactctgtagccattaaataataacttacccattcctccttccctctggtcatttccagtaagtagtagtgctgtgattcaaaaaatggccatttaaaaactattgccagttttactttttcccacatggtggtcatctttttttttttttttttttttttgagacagtcttgctctgtcgcccaggctggagtgcaggggcacgatcttggctcactgcaagctccgcctcccgggttcacgtcattctcctgcctcagcctccccgagaagctgggactacaggcgcccgccaccacgcccggctactttttgtatttttagtagagacggggtttcactgtgtcagccaggatggtcacgatctcctgacctcgtgatctgcccgccttggcctcccaaagtgcagtcacctcttcatcctaaagaaaatggaagcctttgtgtgtcccctttcctgcattaaatactgattattaattgagtttttatttagcattattgggtcttttcaggtggggaagtgagacatagagattgagagggctcccaaaagacagaggtacaaggccaagtctctgccctccagcattttcactttaaatccaggaaaaactgagagtacagagtccaggagtccacgcactaaaatgggaggcacacaaactcaggaacgaaaatagaggagggagactttagagctaagctgggttttggaggcaaggcagaaaaaatagaggaatgggttaagaagagcctcgtggaccagcctggctaacattgaaaccccgtctctactaaaaatacaaaaactagccaggcatggtggcgcgcacctgtaatcccagcttctcggggaggctaaggcaggagaatcgcttgaacccgggaggtggaggttgcagtgagccgagattgtgccactgcactccagcctgggcaacagagtgagactctgtctcaaaaaaaaaaaaaaaaaaaaaaaaaaaaaacaaaccctaaaaaaacaaaaacagctttgtggatggacagggagctgttttcgggcagaccattcacctagaagagggaggcattcagtgaggattcacagaaatgaggctctcagttggtagggcagccactcctgtttatttctcttcttgagcatctttgcttctgagcactgtgaggtgataaggctcaaaagatgagttctttctacaattataggagcatttattgagtatctgctcagctcacactgttacttcaccgaatttcccaaagaactctgaaggtattatcatcttcatcctacagaagaatctgaactaaggtcacaccttcaataagtaggagtgctggcatttcaaacccaggcatttctatttccaaagttgagctctcttagaaggtgtgaactctggaggttgaggcaggaaggttgcgtgagctcacgtgtttcacattataatgagctatgatggtgccattgcactccagcctgggtgacagaatgagaccctgttccaaaaaaaaaaaaacgttgggaacaggtgatcctccaatactcaggttgaggttttcttgagctttttttgcaggggctggggagtggggcgtaagcttagcagataaaatttctccttgctctgagcctccccaggcatttcatacctaccttgcattgtattttcctatcgccgttgagattttcagattatcttgagtggttgaagaaaattgatttttttttttttttttttgggagatagagtcttgctttgtcacccaggctgtagtgcagtggtgcaatctcggctcactacatacaacctccgcctcctgggttcaagtgattctcctgccttagcctcctgagtagatacaggcatgtgccaccacacctggcaaatttttgtacttttagtagagaaggggtttgccatgttggccaggctggtctcgaactcctgacctcaggcgatccgccctcctttgcctcccaaagtgctggaattacaggcatgagccaccgtgcccggccagttgaagaaaattgagatggatgggtccaaattttctccccttgtctgggcagctaagatgagaaatgggaattctgttggaatgaaataatacacttgagaggaagctgaacaaagtggaagaaagatctgagtggggttagaacttacgtgtcagcctcagcctgtccttttgcagatgtgtaaggtgtgggatctggggtcactaactcttttcctgggactctgtttccttacctgaatcctccccatctccagaaacttcataaaataagctggatgagtgttttgaattctaggagtctccatcctttgacgcttctggaaggtaccagggctggagctttaggctgatccaccccctctttgtttgggttcaagccacgggaaaatgggagcttgaggggaaggtcagggattgagatgcttccctttccctcctcctcctccctcctcccagcaggaagggacaaagagttgacctttgttacaggtctacagaatcataattcatagttcatacatgttagtttttctttctttctttacacagggtctccctctgtcgcccagggtggagtgtagtggcatgatcgcaactcactgcagctttgactttaccagctcaagcgagagcctgagcccccacaaagtattgggtttacaggcaccagccaccgcgcctggcttccatacatgttagtttctaaaatatcaggaacccagttacgtttttttcctggcaagcaggaacaggctgcacagtgtagtgacatttgctggccagtgtcaccttgacctctctgagcccgttttctgatctgcagaacggaagtagcaatattcttagtctcccctggttgttgagaggctcaactcagcctcttgtggtggttccaggttcatagtgtgggcaaaaagaagtactttgtgaactctaaagcactatgcaaaggtgagttattaacaagatcattaattgatgacaccccaaaagggctgaaaggtcattctcacccccaaacaaatgtcctactctgcatgggggcgagtatgacttctattgtgactttgctatggagcttcccagaaggccttggggactagcccgggaggagagccttctttctctgcgggttccgaaggctcctagttccgtgcccccaccctgctcccaggccttagttcctggcctcacagtgggaggcctcccgccccgtcccgcctcctcccgcggcccagccaaggtctctaaggaatgccgcctcccgggccattttctcccctccagcctccgcggccccacttccagcctctccctggcttcccggttccctacccccaaccggttgccacttaaatgcttgcaggcctggtgcaggcgggaagcccccttcccccacaggaccacctcagtcacagccctgaccacagggaggtcgggtctggatttactaaaggaccccagagcgggagactgcccctcgccggctgcctggcttcgccatggggtcgggtttcgaccggccggtggctctgcagagagacaaagggcaaagtcctgggccccacccccaccccgcagcccctggcgcgggtcccctccccctcggggcccagggcgggtagccaagggccgcgggtccccgccggacaggtttggagcgagtcggggcgcccaagggggctttggcggtagaacattcgagaccgtgcggagccctgtagcggaggggctggggggctgctctgtccccttccttgcgcgctgcggcctcagcccacccagaggccggggtgggagggcgagtgctcagcttcccgggttaggtgagaggggctggggagggggcgaccgtgggcacaggcggggacagcccgcccctcagctgcgccgtctcagttctcaattgcccgttcacgagggcgcccctcccccgcctcagctgccgccgcccttcccaggcaccgcactatccccgttagtggttctccccgcggtccccgtccccctcagtctccgcctcagtctccccctcagtccccgtccccatctgtctccccctcagtctcagccccccagtcgccgtccccctctgtctccccctcagtctcagccccccagtcgccgtccccctcagtggcccgctctgctgcgctttcccctgctccaccgcgaggggccgtgttcaccgcctaggttctcttggccgtcccctcctcctggccaaggataggcgagaaccatcttggaaggcactcagtcctcccagacaggatccttggtggtagaacattctagaccgtgcggagccctggggaggaagacctccacagagagggcacttgagggggggaggagggccacgttggggcccttgtcaggggagagactggctgaggaagcgcccgccaggaagaagccagctgcagcgcctgtttcccaccgcaggtcatggttggcagctagggggagacgcggatccctgagggctactgcgcagcggccgccacttatggacacgcagacgcttgcggggctggtgcccagatgtttgcccatcgtcatcagggggcactaaggaccccgaggagcacggggatgtctgccgggtccttctcatggtgcggtgggaagctgccgaagacagattgctttggaggctggtctggtttcctctcctggctcctgagagggccacctcggctgttccctctggaggacagagcccgactctgtctgttttcaaggtacctctcatgacgccttccactgggcaccagctccatcctcggccgggcctctgaaaccccgagtgcctgagcgtgtgtcctgtcgcccaggctggagtgcagtggcgtgatctcggctcaatgcaacctcagcctcccgagtagctgggattacaggcgtgtgccacaacacccggctaatttttgtatttttagtagagacggggtttcaccatgttggccaggctggtctcgaacttctgacttcagatgatcctcccgcttctgcttcccaaagtgctgggattataggcgtgaaccactttgcccggccgtgaccgtatggcttttaagctttctggagagaggctggcatctccaccgggggcgagtgctaaaccagcatctccagagaggcggggccgggccagagatggtcttcctgccccccacctttccctcggtcggagcttagtagccttcccgacccccgggggaagattccgaaacttcccttcccactgccagtctgagaaggatcgtgagcaatgtccctgagggggacctccccatctcagattgcaggagggaggctcagttgcacagctcccgttgggtcacctcttttctatttgtccccgtactgtaggtttgtcctgatggtttcttctccacttcctcagtctaccccagggaccccccattctctgtgcttccacatgaccacttctcccctttgggagccactcaaggtcgggggagagggtggcagttggagaccaggctgatgtggaatttgtctggaaagagctggactgtcccagagcttctgttttggcctccttgggggctgctcagatgggctttcttgtcaaactatttccgagataggcgaattgagcaaagtattcatgctgaggttggcttgaccccaccgccacttagcaccttccacaagttgcttccttcctcccccagagcaagatgacattttgcatggtagggatttttggtgagcaccctttcaccccactaacaaatctccctgacagccatccagccgtatgatagggcacttagctcttctgcaagtgaaatcccgtgcccaaattagagccgcatgcagtaaaagccagttggcacgcacttaaccatacagaatatgggcacttttcctgcttctgacgtcggggctgttcaggcttctgctgtattaacacttgtcttcagaaagaaagcagtggagtttggtgcagtgagcacaagcagcctactagtcctgcctccaagttggcaagtctgtttccttctctgagcctcagtttctccatctgtgaaatgagggtgactgttcagcatcctctcaggcttcagaggcttacccctttcctttctgcctcaatgtatgaatctgatgtttttcaactggaacttcttggtgacagattaaggtgtgtgtattgtgtgtgtgcgtgcgcacgtgtgtgtgtgtgtgtgggatcatataagctgagtgattcccttctctcccctaaatatgggtagaagagccctccagaggagtgggaagaagggttcagcccagagtagctcttggtgacctgcttttccttcctacttttcccccaacaagtagtataggaaggaggcagtgcgtgtatgccacatacattaaaagaccttgctcacagggtgacagttgcattccagtggtgtcctcaccttccagtcccctcacactctggctttcttcgtggtggtggcatctgctctgcccagtcccacatctcccagtaggtcaatgttttctggcccctacccctgccagcctgccactcgacagcccgccagcccgcccgcccgcccccctgtcctcctgcccccccgcctgtcctcccgcctgtctggctgccctgcctctggatcagcctggcacagagccctgggctttcggccagctcctcctcccctccccgcccccgccccctttctcagctactgccatcctgaagcgtgccaggtccgcccccttcagaagttttcttggacaatttttttttttcaccgcctctccaccctgtagggataaggaggcggggtggggaggaaggactgagtcagtggtgattttctggaaaaggcagaggttggcaccttagggcaacttccagatgggagcgacaactgggagaggggccagctttgggagggggcttctactctggtgtcagccacatggaaccctcttgttgaagagtcagcagaatcacctacttctgaaggggtccagtgagcagctctccctcactccctggttagctttgtcctcttatcccaaaccaaaccagaccaaatcaaatcaaaccaggtcccctgctggactgtaaaccctgtcaaagcagggaccatgcctatgtgctgggtactgtagcacagtgcccagcactgtccaatagaaatgcaatgtgagccatacatgtaagtttctattttctacgagtcatattaaagaaacaggtgaaattaattttaaagatagttaacccaatatataaaaaattatctcaacatgcaatcaatataaataattattaaagagattgctttttggagggtacttaagttttagaaatctagtattctaaactagattaaaattatttcatattcatttatttattatttttcaagtcagagtctcactctgttgctcaggctggagtgcagtggcatgatatcagctcaccacaacctcagcctccggggttcaagcaattcttgagcctcagcttcccgagtagctgggattacaggcgcctgccaccacacctggctaatgttttgtatttttagtagagatggggtttcaccatgttggtcaggctggccttgagcttctgacctcaggtgatccacctgcctcggcctcccaaagtgcctcaactttccgagtagctgggattacaggcatgcaccaccacgcccggctaatttttgtatttttagtagagacagggtttcgccatgttggccaggctagtcttgaattcctgacctcaggtgatccacccacctcggcctcccaaagtgctgggattacaggtgtgagccaccacacctggcctaacacttaaagttacaaaattaaaaattcagttgctcagttggactggccacgctgtaagagcctcagtagagcagccacatgtaattagtggctcttgtagtggacggagaaggcccagtgtgtagtagctgtcaagataacaacaataacaacaaaaaagaatggctccgagcagctggacccttaccagaaaccaccagcttcttgacttctgattagaaatctggtacctgttagatgacgtgagcatggtgtgtgtgtttttgcaggtttgaaacatgtttgttgctcactcttttccagtatcctgggaaccccaaactggctcccagtctagctttgttgtctaattgcctcaggctgattccttctctacttgttgagatgcctgcagccatgactgaagacttggatatctttgggatgaagttaaattgtgttaggtggggatgggggttagggagtgtgcctttactttggggttatggatggattcgaaagtcttcattaatccctgaaatcttgaaatggtgtgcaaagtgcatttttctggtggaatgttcttgccttttatcctaataggaactgtttcaaaaaaaaaaaaaagttaagaaccagttattcagactattaggacacagaaaatccctctaattaagaaggtgtttccttataggtagacagggttgatccctgtctggggacacaggaccctctaagatggactaaccctactcctagtttcccagatgtgagaaactgaggtccagagttgaaggccacacatggagccagaagcttggcctgggggaggggtggaggtgaaggttctaatctgaagatcctggtttaatcctacttctttgctggagatgaaagtccaggcttgactcatgacaggggccctaggggaattggggccccaaactagacaagattccaaaacctgctcccaccttgccctcctcccttccttcaactggcttgccccaccccagtttaaaggcagtcctccctctagggaggggtgagggaggccataaacatgattgaaaatggcatcctcgcttctgggtatgggggctgaaagaaggagcaggtttgcagaggattagagaaataccagtcccaggggtagttttcagtctcccattcacactgtgcacagtgctttcctgggaggcctctttctgagaccatctcatctggtgcatttgctccttcctcccttggagcccaagcccttgtctccttccaaccccccgtaagctcctcaaggttctggattctttcgaatagaacaccaataggaaaatttcatcattacttcatactagtttctattaattttgaactgctaataacttcagaactgggtgagctggaattacgtctttttagtttttacctttttattatggaaagaaatataaacataaaagtagaaaggataatgtaataacccctctgtgtaccatccatcacttagctttaaaattaccatgcatatgtagtctgttgtcattttcccctgtgctctgattattttgaagcaaatcttagacatgtcattttatttgtaactatttcagtatgtatttctaaaatataagaattacaatatgactttaaaagattgacaacaggagtgagccattgtgcctggctcctaacttatactttatttatttagtttgagacaggatctcactctctcacccaggccggagtgcaatggtgccatctcggctcactgcaacctctgcttcccggacccaggtgatcctcccatctcagcttcctgaatagctgggaccacaggtgcacacctggctaatttatatatatatatatatatatatatatatatatatatatatatatttatatacacacacacacacacacacatacacccacacatatatatacacacacacacacatatatatacacacacacacatatatatgtatgtatttttttgggggggtggggtggggtgggggacagagtcatgctatgtcacccaggctggagtgcaatggtgcgatctcactgcaacctcccagcctcttgggttcaagcaattctcatgcttcaaagtagctggggttacaggtgtgctccattacgcccagctaatttttgtatttttagtagagacaaggtttcaccatgttggccaggctggtcttgaactcctgaccccatgacccacccacctcggtctcccagggtgctgggattacaggcgtgagccaccacacctggccctaacttctcctttaaaggaagggaattaacacgccaggctctgagattcattatctcatataattctccctacccactaaggtggtatcaacggatgttttacagaccagggtactgagatagagaggttgagtatcttgtctaagtcacacagccatgcagaaccacagccagaatttgaacccaaagcctgtttgaatccagactcttcgcactgtccctatgctgcctttttgatgacataaaagggacaaaaagcatttgccaaagtaaactcactttaggctggaggacaaaataaaaaacacttaagagttcacacgacccagtgaacagtgggtctgcaccgtggaattgcactccgataaatcaaaacatcccacctataattctttaagctattaacttcttcttccagcagcgtatttccatagttagttgaaaagtgattatttggcatattgaacattgactaggtatttgatgacatcaagaaattattgtcatcctggtgtggtggctcacatctatacagcactttgggagctgaggtgggaggatcgcttgaggacagacaggagtgtgagaccagcctcgaaaacatggtgaggccccgtctctacaaattaaaaaaaaaaaaaaaaaaattggagccaggcgtgatggcgcatgtgcctgtggccccagctgctcagggggctgaggtgggaggaccccttgagcctgggaagtcgaggctgcagtgagccaaggtctcaccactgcactccagcctggatgacagagcaataccctgtctcaaaggaaaaaaaaaaaagcaggctcttccctaattgagaactgttttcttttctctttggtgtaagtcagtgacacttctctgaactcttgaggtatgaaggatgagaactctcagcccagggagagttcccaacctcatctccctcccaggggccctgctccctgtgcttcctgaatctcttacttcctacatagctttttaagctgttgcaaggatgctctttccctctgttttctcctgaatcacccctgggcttctggaggatggtcactcagtctttgtggctcttatgcctcctccttggcccagcagcgtttgagaggtgagtcctcaatagctgctatgtatctggcaagctgccgcccccgtccccacgtgccccacccctggcccaggacctgataactgctctgtacatcaaggaaggcagaggacaccagaagccacagcatgttggcacccagaaaaataggctggtgcaactgttgcctttattgccaggggctggttgcttcattctttgaatccacaggtttatcagctataggagggtggtggggagggactaatgaactcagagttcaccttccttttctgaacaatggctgttcatcggtttaggcaatccaggcatatagaaggtgcccagaagatactgcccatagggcaaaggcacttctcagctctggtagaagctggtctactgaagtgctggagcgggtccctggtccctggaccctttaactggggagatgggggtggggctctaggcagtggtatttttcactattttccccaccagtgcagaagtaaaatcttaataactgttaactattgtcagccctacccgcctgcctctttccatactagtctggatactccagttccctgggactggggacttggacatggtttgagtgcttactacatggcaggcagcttgttttataaaagccttattcaagtttcataggaggtaactaaggttcagagtgaagaagtaaccagttagggtgctcttagcttccatctggatcccccaagttcccaacacactgccccagctcagcctacaccaggccttctctaagtgtttgtggaatgaatgagactgggaccaagggaagggaatacgggttacagtgatcagaaatgccccatgtgctttgaggcctgaaagaaattaggtagcaccatatttaatagaaaccgggccaagggcttaaaagacaaaggttcttcacggcctctgtgcctccctgccccccgccccgcccctcccgctgttgtgttttaatcagggctgggggctttgttgaaaggaggcagcctggaggggcctggagtgggttcccagggtggggtgtgtaccctggagggctgggtgagtccctgctggttgggggcaggggagggctgccaggatgtcttttctttcattggttgggtggccctgccctcctccccctccctctcctggaacattccagacattccagacgatctgcctgccattgctttcaggatatggattaacatcctagcagagatttgatttcaccactgccacccttctcccttcccccatcccctccacgaaagaaagcctctaaaactgggagtttgaagtgcgagggaattttgacctttgaccttagattgtactaagggaccatcttgaaagagcacacttcaaactgggcccctaaactggggttcccttaggcccttactggtttgaactcccaggtaagccacccccacctctctgcccttcatccagacatccagaagtgttcccttgagggaggtcctgggcctgggccgaagcaatacctgttataggtgttaaactaggtctgcgttctcaaccttccaatggcatggccatttcttttcctcatttcttccggcagttttgctttcattgtgagggcttctacattttcagtctgtctagttggtcatcgaatgagttctaggaaattcctcacaagggtagatgtgggggttccctcttggccaatgaattgaatcacaaaaaggtggtctgatggcatctggggacctggaactggatttgtatcttactattttgtcctgctataatctgacttacttaggtcaagttcatgaacaaaccaaagaagacagccaaagacagagattctcttcaatgtttatttccttctttccccattatttcatccctgggagagatttccttaacatattttatggatgaagactctccacatttagaattgcaggctagaaaagatcataaagatcttgctgtacccactgtaaacctggagatactgaggtcatatgggtaaagtgagtgaactggctcaggacagccaaggtcaacacttttacaactagagcttagcatcccccttccctgttttcaaaccccttcccccaagcttggcagggctggcactgtccccattgcatgtcaggtaggaatactgaggcccgaagcttaagagaggcttaattagagggacagccagtcaggggcaggttaagggctagactttcttgctttctagttcagttttccttcaagccactagagtttttttggacattgtccttggactaagagtttatgatcaaggataaacaaagatataaatgcaattggccaatgcatcaagtcaatttaaaaatcttaaacccagggattagcgcatttatttgggtggtgagcgagtgatctgggagtcgaccctgagcctgaaagccttcctcagggaaaactaccttttttttttttttttaaacaagtctcattctgttgcccaggctgcagtgcagtggtgtgatttcggctcactgcaacctctgcctccctggttcaagcgatcctcctgcctcagcctcctgagtagctggaattacaggcacgtgccaccacaccctgctaattttttttttttttttttttttttttttgtagagaggaggtttcaccatgttggccaggctggtctccaactcctgacctcaagtgattcgcctgcctcagcctcccaaagtgttgggattacaggcgtgagccaccgcgcgtggctaaaaattacattttaaagatgggaagaagaaattacctgggcatagtggcatgcgcatgtggtcccagctatacaggagggtgggagctgggaggatcactcgatcgcagcaggtctaggctgcagtgagctgtgtttatgccactgcactccagtttgggtgacagagcactttacaagattgttaataataatgataataaagatggaaagaagacagtactgtatagttactgggagaggggaaggtagtggcattatgctgacttgtatgtgtgttaatcactcccaccttagtattcacagatacatctattgttatacttcaagtacttacattttctagcatcacctaccaccctaccaccctgtggaaaggtattatctctgttttacgtaggaagaaacggcctcaaagaggttaaacaatcttgtaaaggtcagtattagtaagtggagcataggtttaaatccatatctgtgccaaggacttaaccactgcactatatcttgctgtgatttgtttgcatatattatctcacctaataaattgtgaacaccttcaaccaggcattttgtctcctttgtttatttgtgtgtctccagcatctggaacaaagtagtatgtgaagtaggtatcaattaaatggttgttagattaattaataataatgtcttgggccgggtgttgtggctcatgcctgtaatccctgcattttgggaggccgaggtgggcagatcatctgaggtcaggagttcaagaccagcctgaccaatatggtgaaaccctgtctctactgaaaatacagaaattagccggatgtggtagtgcacacctgtaatcccagctactagggaggctgaggcaggagaatcgcttgaacccagggggcagaggttacagtgagccgagatcgcaccattgcactccagcctgggtggcagagcgagagactctgtctcaaaaacaaataaaacataaaaaataatgtcttatttagctttgtattcctagtgcctggaacatagtcatggtaacctgcttactgaataaaggaatgagaaagtggtgggacaaacaaagtgtgtgtgtgtgtgtgtgtgtgtgtgtgtgtgtgtgtgtgtgttgggaatgttaacagagtgcttagaacacctgattctgcattcctaggtatggtagcatccatgataattttggtctctaaagcgggtacccctactccaagtctccattcctaaaagtgtattcttagattttaagactatggtgttggtgagcagaaggtggggaaatagaaactggggcaaggattagaaactgcgagttcacagacccctaatgtattcagagctttctttaactctgctccccctttactttcaggagccggaaaattcaaatccgaaatattccaccccagctccgatgggaagtaagtgtttgggggaaactctaaatggagtgggatagtggagcctggaaagtacgtctggactagctggagttgccagaaatgattggggaggtctggggccaggctagggaggcctgggtctcatcctttctttctttttttctttttgagtctcatcctttcttctttttctttctttcttttctttctttttttttttttttgagatggagttttgctctttttgcttgggctggagtgcagtggcgcgatctcgactcactgcatcctcttcctcctgagttcacgcgattcttctgcctcagcctcccaagtagctgggattacaggcgtgtacccccatgctcagctaattttgtgtttttattggagacagggtttcaccatgttgatcaggctggtctcaaacgcctgacctcaagtgagccaccgtgcctggcctcatgtaacccacagccccatctttaggttgtccctatggtgagagacattagggaggtggatgagtgtttcctaagccctaaacttggtaatatggcagaagataatttagggacccaggcagcccaggtctgcttcccaaaaggcccttaaggcagaacttaagtacactcctgcaaagataccccatcagcattagcaccctagaaaggtcacactggacaggtaataatgctcaaacactcctatggctctgtcaatgcccgattgctttgggatgcagggtgtccagtggctgctttgcaagggtcttgggactcagagttaagtgtacttcccttctccattctcctaggtactggacagcctgctggctcagtatggtacagtagagaactgtgagcaaggtaagagtgggccgggtgtggggtggcactcgtggtgggggttggaggagtttggtgcatttgttctgcttcactttgtttctttctttttctcccttccttccttccttccttcctgccttccttcctgcctgccttcctgccttcctgccttccttcctgccttcctgccttcctgccttcctgccttcctgccttcctgcctgccttcctgccttcctgcctgccttcctgccttcctgccttcctgtctatcttgctctgtcaccaggctggagtgaagtggcgcaatctcggctcactgcaacctctgcctcctgggttcaagcgattctcctaccttagcctcctaagtagctgggattataggcacgtgccaccatacccagctgatttttgtatttttagtagagacgcgtttcaccacgttggccaggatggtcttgatctcctgaccttgtgacccacccgcctcagcctcccaaaatgctgggattacaggcgtgagccattgcgcccggcctctgcttcactttctgtgatcaaatctacattgaaaaccaaaagaagaaaggcagatagaatgtgttaggcggggaaatacattggattgggggcgtggactcctggcctcggcttcggatcttggttatctgtggaactgggtttctcttctgtttagcaggaggcttgaacaaagccactccttcccagcctggagtctccaggctcttagggatcaaccaaggtagaaatggctatcccaggattttagaactagtctaagaacagaaatcttgcattcaatcggagttactctgcagccgttttacttgaaaagcttcgtgtttcttgcttttggctggaataatcaaccggttgtctctttttagaagctctgattggtagcaatatatgtctttggtcaattaaaataaaaagcagaggatttattacttagttaatgtagttcaataggtaagcaaagtcttttgaagagtaggcccacagaaggaaaaatgataaagaattctaggtcataaaaagtttgccagccgggcgcggtggctcacgcctgtaatcccagcactttgggaggccgaggcaggcggatcacgaggtcaggagatcgagaccatcctggctaacacggtgaaaccctgtctctactgaaaatataaaaaattagccgggcgtggtggcgggcacctgtaatcccagctacttgggaggctgaggcaggagaatggcgtgaacccgggaggcggagcttgcagtgagcagagatcgcgccactgcactccagcctgggcgaaagagcgagactctgtctcagaaaaaaaaaaaaaaaaaaaaaaaaaaaagtttgccggctgggcacaatgactcacacctgtaatcccaatactttgggaggccaaggtgggcagatctcttgagccacgagagttttgagaccagcctgggaaacagtgagactccatgtctacaaaaaattagctgggagtggtggtacatgcctgcagtcccagtcactagggaggctgaggcaagaggattgctggagcccaggaggccaaggctgcagtgagctgtgattgtgccactgcactccagcctgggtaagcaagactctgtattgtctcaaaaacaaaacaaaataagttttgtccatttagtaatggaaagtgactttggttggacataaggcggtctttaggtagataagatactgggttaggtttggagatcttcaagaaacaagtggataatcacttggtttgagatttaaatattcctctccaaattatttgtggaaaggggcaagttataaatgattataaatgatgaaaaccttcacccacgcaagagtaaactgctgaatctatcaaacacattctaacctgctctaatcctgtggcttgccttttatcttaaatgccaggatacaacaggactcactgataactactgcccagtactgttcacagtttagactaatgaataagttactcctggacaaacagtaagattgagcagtggcttgggagcaagtgcatgctgaatttcactgagaggtgtgtaaggaatcaacactagtttaaatttatccaaggctcactagggagctgtaacacaccctgtctggaaggatatctgctacctggagagaacagtatgggaaatgtttgactttgttggacagtagagaaagtccttgagtctgctcaaaagtcactttgtgagtgaggtccattctttctacctatcccatcctctttcatctgatttattattattattatttgagatggagtctcactctgttacccaggctggagtgcagtggtgcgatcttggctcattgcaacctccgcctcctgggttcaagcggttgtcctgcctcagctcccaagtagctgggattacaggcacccactaccatgcccagctaatttttgtacttttagtagagatggggtttcaccatattggccaggctggtctcgaactcctgaccttgtgatccgcccacctcggcttcccaaaatgctgggattacaggagtaagccaccgcacctggcctcatctgatttatatttttccatagcagtcatcactgtcaaatattctgtagaacttgcttatttattatgcttattgttatctctccataagctccacaaaggcagaggttttgttggtttactactgtatttccagtcactggaagattgttcttgcagaagcttccttaccactgaggagggagagacctactgatgaagaccagagcagttaagagtggcctggggcctagcgtggtggctcgtgcctgtaatccgaggactttgggaggctgagatgggaggaatagctttagcccaggagttaaaggctgcagtgaactctgattacgccactgtactccagcctggatgacagattctttgcactgaagtttgtgaccaagtgccttatctgtcctcagtgttgtggggggcagaggcttaatttaagccagggtcccccaccccatggttgagcaagcccaggggacccaaattcacaagacattgatacaggagaaggaaggttaactttatgtatttatttatttattttagagacagagtctagctctgcctcctaggctagaatgcagtgtgatcatagctcactgcagcctcaaacttctgggatcaagtgattctcctgctgcctcagcatcccaagtagctgggactattggtgtttactactgcacccggctgattttttttttttttttttaattttttgtagagacggggtctccctatgttgccaggctggtctcaaattcctggcaccaccttctgaagtgattctcccacctcagacggttaattttaataattgtaagtgagaaatatgtttccagactgcttgggattctaatgtcagcttgccaaaccattttcctagttagagccaagaattttgatgggatcaatgactagcatcctgaggctacaatggccacatccaagacaggaaatcctttcccctggaaaacatgcaaattcttttttttctttctagacttctacagccattcctgtcagtccatttagctggacttttttttttttttttttgagatagagtctcgctttgtcacccagtctgaagttcagtggtgcagtctctgctcactgcaacctccacctcctgggttgaagcagttcttctgtctcaacctcccaagtagctaggattacaggcatgcaccaccacacttggctaatttttgtattttcagtggagactgggttttgccgtgttggccaggctggtcttgaactcctgacctcaagtgatccacctgcctcagcctcctgaagtgctgggattacaggcgtgagccactgtgcccggcctctgtttagctggattttaatacactttggttcttgtgtccttgaggatacataggcctctagaatggatttaggtgtttccaagtgttgtcagccatatctttgcaggccatttcttgggatgtttacttctataaattgctaatctcattcagcgtgtgttgatttttaactagttgaactttttttttttttcttttttgagacagagtctcgctctgtcgcccaggctggagtgtagtggcacgatctttggcttactgcaacctccacgtcccgggttcaagcgattctcctgcctcagcctcccaagtagctgggactataagcgcatgccagcacacccagctaataatttttgtaattttagtagaaatgggtttcaccatattggtcaggctggtctcaaactcctgacctcaggtgatctacccgccttggcctcccaaagtgctggggattacaggtgtgagccaccgctcctggccaactagtttaactttctaaggggaatttactcccaggttgtgtgtgtatgtggaggtgggtagtagtgtttgccttgctgtatagccttgttgtacaactgctgatagggtggctacacccatttgtatatccactttcttgggaaccggctgaggaaattacaaaaagcaagaaggtaaatttgaattttctttctttgtttttctgagactggctctcactctatcaccccggctggagtgcgttggctcgttgcaacctccgcctcccaggttcaagcgatcctcccacctcagcctcctgagtagctgggactacaagggtgcaccaccacgccaggctaatttttgtgttttttgttagagatagggttttgccatgttgaccaggctggtctcccaagctcaaatgatctgcctgcctctgcctcccaaagtcctgggattataggcgtgaggtaccatgctctgcctggtaaatttgaattttctagtagcttccttgaaaggggaaaagttttttgcctttttattcaagttggagtatctgccaggtgtccttttctttcttctttttttttttttgaggtggaatctccctctgttgcccaggttcggagtgcagtggcatgatctgggctcactgcaacctctgcttcctagattcaagtgattcaagcagttctcctgcctcagcctctccagtagctgggactacaggcacgtgccactacgcccggctactttttgtattttttagtagagacagggtttcactgtgttggccaggctggtctcctgggctcaagtgatccgcccgcctcgccctcccaagatgctaggatttgcagttgtgatctaccgtgtctggcctgccagatgtcttcttgatctcaaaacgtggaaagctggagttggggattcattgattgggcctccagatttccctgctctgaggttatcctctcttttctctgcagtgaacaccgagagtgagacggcagtggtgaatgtcacctattccaaccgggagcagaccaggcagtgagtgggctgggaagtggggctgggtgcggtgggggggggttctgtgaagggtggtgtgagcctggtcccactttttcctcaggggggtctaggcaggctgggtccccatccagggttctgatattagcccaagccaaacctagaatcttccataaaaggtttcttcagggggtctccttcatgtccattgtttcagggatctcaaaggctcagaaacatcaagattgatagcaaaaatacatagaagggagggctccaaagccctcccagataagtgggaaatcccttgcagagaaaatgtcccctgctgataggtctctggttgctccaggaccttagagtcctttgccgtgttcatggcgccatctagtgataatgagggggaacttcggggttcaaaaaagattcctcaaccttgggatgctgggacattttattgcagtgatggtcgtaaacctagctggtgatagttgtggggtccttttagtcccatcgcacccacaattttagctcctagccctttgattgagcaattatgcgtctcactcactgttacagacagactatacattttgcgcattactcatttatattaatatccgagcccgttataggcttttgccacattttgctttgggctttcttgcttcttaacatgccgccttctccaatctaataatactatgtaaaatcctacctcttcttcaaatacctaccattttcttttagatacctcctgggctcagaattttctagaggttcctactgccccttgtggccactagggtttggctttaaagctcatgtcaacagttgttcattctctcctgcctattgttgctgtgttcttgttttttggagacaagtctcactctgccacccaggctggagtgcagtggcatgatatctgctcactgcaacctcaacctcctgggctcaagcaatcctcccacctcagcctcccaagtaggtgggactacagacatgcaccattatgcctggttcatttttgtatttttttgtagagacgaggtttcaccatgttgcccaagctggtctcgaacggctcaagtgatccgcttgccttggcctcccaaagtgctgggattacaagcttcagccacctcgcctgccctttgttacctcgttaacatttctgggctttttatttatttatttattattttgagactgagtcttactctgtcgtacaggaggctggagtgcagtggtgcaatcttggctcactgcaacctgcgcctcctggattcaagcaattcttgtgcctcagcctcctgagtagctgggactacaggtgtacaccaccatgcccggctggctaatttttttttttaatcttttaatttttattttattttttttgagacggagtctcactctgtcgcccaggctggagtgcagtggcgtgatcttggctcactgcaaccttcacctcccaggttcaagtgattctcctgcctcagtctcctgagtagctgggattaacaggtgtggaccaccacacctggctaatttttgtatttttagtagagatggggtctcaccatgttggccaggatggtctcgaactcctgacctcaagtgatccacccacctcagccccccagagtgctgggattacaggagtgagccaccgcacccggctgccttattaacatttctaaccagtgtcagccttgggaatggatgatgcttgtgccctcccttcaatcttattcagccccattttacagacataccaaatatactgagactctagtctccaagtggtaagcaagccattctgtctccaattcctatgtctttgccacggttaaaagaaaaataattattttattttttgagacactctctccctgttgcccaggctggagtgcagtgttgcaaacacagctcattgcagctttaacttcctgggctgagggaatactcctgcctcagcctctaaagtagctgggataacaagcatgcaccaccatgctgggccaatttaaaaatttttaatatttagagatgggagtctcgctatgttgcccaggctagtgtcaaactcctggccttagcgatcttcctacctcagcccccccaaagtgttagaattatatcatgatttgccccttttttttttttttttttttgagatggagtcttgcccaggctggagtgcagtggtgcgatctctcttcactgcagcttccacctcccgggttcaagtggttttcctgcctcagcctcccgagtagttgggactactggactacaggtgtctgccaccatgcctggcaattttttgtattttttagtaaagacgaggtttccccatgttggccaggctggtcttgaactcctgacgtcaggcgatccgcccaccttggcctcccaaagtgttgggattacaggcatgagccaccacacttggccttttttttttttttaaacctcaaaatctttaaaaatgctgtcgggtttagtggctcatgtttgtaattccagccctttgggaggccaatgcagggtgggttgcttgagctcagtagttcaagaccagcctgggcaacatggcaaaaccccatctctataaaaattacaaaatattagctgggcatggtggcacatgcccagcaggttgaagtgggaggattgcttgagcccaggaggtggaggtggaggtggaggttgcagtgggttgagatcatgcccctgaattctggcctgggtaacagagtaagaccctgtctcaaaaaaaacacaaaaaaaacaaaaaaaacaaaaaaaacgaaaaaccaaaaacacaaaacttttcaagatggaatccacagaggtggattcaaccaaaggaggtgccagacttaataggtgtaaaaatgacaaatcccttaatttattacatgttttcacttgtgattgtcacataaatcccgtaagatatgcagtttcggctgacattgacaagttgatcttgaggaaatgcagaaaaaccttaacagtcttgaataagaagaacaaggaagaattaaactcccgaattttaaaacttacatcaaactacggtagtcaaattagtgtggtaccggcttcaggataaacatactgatcaatggaatagaattcagagcctagaaaagcctttacgtttatgatcggctggtttttgtttttattttcacacaaagtgctaaaaagacagtttattaggaaagataaggtgttttcaacaaatgatgctggggcagctcgatgatatccacatgacaaaagatgaatttggacttctaccttacactgaacacacaaattaattcaaaatggattacagacctaaatgtattagctgtaaggtaggcagggcacaagtatcagttttcctttacagttgatgagacttaggtctagactaggttgtaagtttcctgcttcatatagctagtgagcaatagaactaagattggaatactggtgtcctaattcagttatctttgccctgggagcctgggcagatgcggatgcgaggtgcgctgggaggtggcagcggtctggggcagtggcctgcggtgggtaggctgggacctcgcagtctccccacacacatgtggggccccaccacatggcgcctccctgcgggcgtgcacctgcagcggtgggggtggctggggcacctgggaacggggatgccttgccctccgaggtctcccctgggcggccgcccatgccattttccgggctgctcgccttctagaagttcctgcaggaagctggtgatgtggcctccctgacccgggcccgccccccaccactttgctggaggggtagtcagattccagccgggatacgtagcagcagcttggtggcaggcgataggaaaatgggcaaaagccccaactggctggaaggcaaccccgggggccggacctccttgtgggagggcccgggactgcactaggcgggagtggaggccgcggctccaggctggtctcggcctggtaatttgacacggccagccggtcactgtttaaggcactgtgtaccattttactaacttaatcctcacggtgaccgcatttcccagctgggccaactggtgcggggttgactggaagcgaccggggttgactggaagcgaccggcatagcgcttggcaagtatatagcaggtagtaaaatggctgtaattttgaaagttagctttgtgaagtgttggggctgcggcatctgctggtggtgtgtggtattacagccccgtgctggcggaccccattgggttggggagcgttgcgagattgtggccccagagccaagtgggcagttaggggtctctggagactctggaaggagaggtagcacaaaagacagcggaggtgttcgcttcggcagcacatatactaaaattggaacggtacagagattagcatggcccctgcgcgaagatggcacgcaaatttgtgaagcgttccatcaaaaaaataaaaaaataaaaaataataaaaaaaaatgggggactgcggaggagctaaaatttcgagactgcatgtttgtttttttttgtgcaccagcagctcattagaagaattcctcaattgctgcttcaacacccgccacgatggcgttcaacctggcagattaatttaacaactctctgatgggttgccctgaaatttgaaaaacagtgccttgggctgggcgcgatggctcacacctgtaatcccagcattttgggagaccgaggcgggcgaatcacctgaggtcgggagttggagaccagcctgaccaacatggagaaaccccatctctactaaaaatacaaaattagcggggcatggtggcgcatgcctgtaatcccagctactcgggaggctgaggcttgaacccgggaggcggaggttgcactgagccgagatcacgccattgcactgcagcctgggcaatgagcaaaactctgtctcaagaaaaaaacaaaacaaaacaaaaaacagtggcttaagcaaaggccacaagaaagaattgagatcaaagaggagtgtgtgccatggctatggaggggtttcagttgtgaattatgaaatgtcatgtaaaccatttcaagcatttcaaggagtttgaattttatataaaaaacaatgggaagacgctgcaagttttgaagcagcatctcagacatgttgaaaaagatgtttggatccctaaaataatgagagaaaaggccagagagaggtgttctgaacaacttcaagattttaccaaatgttgcaagaactctggaacccttacggtaggaaaatgctggaaagaaaattctctattgaaaggacgtctaactgctcactataatgatccagccttttatgaagaatgcaaaatggaatacctgaaggaaggaagaattcagaaaaactggaatttctacaaagagaaggctacagaaacttcccataagcctgtaggcaaatattcaaatgatattcaggaactctaatattcatggaagtcatttatagtataaatttccttaaataatggactcaagaatgtgtgtttgctttatcctaattatggaaatattaatttttatctgaaataaagatcttttatttcaaaaacgaaaataaaccccacacttcattagggcaggattaacatttgaattctacatgtatacatttcaatctcctttgaccttggtttcatcatctctaaagttaggagtatgtagtagttagcagttggtttcctcaccctgtagtagggattcctcaatccgggaagtgtatgtgttagctttgtggagcctcttcaggtctgtggtaggctttccagttggcatgggagtactttgagatctatggcttgctcttcctttttaggctagcagaaccctatactttctattggactggaagcccatttctctgatggttccagtggaaagcctttgtgaacaataaatcccaactaagtgttagggaacactgtatttatttacttttcctttgaagtctttgatgccatttagactggaaagttgtgaaaaatggaggtggaggtagtgggcaggtgactatctccttttctttagtgtgttccaagctgtaacttactagagtgctttggccaagagagcatctggtatgattggcatggattggaatgacctgtagactctcactctgtccccagagccatcatgaagctgaatggccaccagttggagaaccatgccctgaaggtctcctacatccccgatgagcagatagcacagggacctgagaatgggcgccgagggggctttggctctcggggtcagccccgccagggctcacctgtggcagcgggggccccagccaagcagcagcaagtggacatcccccttcggctcctggtgcccacccagtatgtgggtgccattattggcaaggagggggccaccatccgcaacatcacaaaacagacccagtccaagtgagtcttggctcttggggaatggaggttgggtgctagggaacagtggttggtacctaaagaggcctcctggaagcatgctggagacatcaacatttaccttttaggaaatgttgcctggagcattcaggggtccctgcttccaataccagcctcctgggaaagggagggcagatagggagggagaatgggtctggggtgctaggccacacactcgtattagcaagagagattctataatttctcatgtgaagtttcataaaaaaagtctccaagcaaacctcattttgatgagtcagcaactcagtgctctgtgatttcatgatcacttagtgtggtaacagggctggccaacctgtccaaaattaggaccttcataattgtgtcccatctcccattctgccactgccaccttctttctttaatatttttttttttttttttttgagacagagttttgctctgttgcccaggctggagtgcagtggtgcgatctcagctcactgcaacctctgcctcccgggttcaagcaattctcctgcctcagcctcccgagtagctgggattacaggcgcgtgccaccatgcccagctaatttttgtatttttagtagagacagggtttcaccatgttgatcaggctggttacgaactcctgacctcgtgatccggccgcctcagcctcccaaagtgctgggattaaaggcgtgagctaccacacccggccttttctctaatctttatatctgatcagtgtactcagtggcaaagaacaggtcatattatgtccttatcatagtaaatcttgttatttactttgagtttggggcactgtgtcttctctttatatttgtttcaagggggacatacggaattcaagcggaaatgcagctttggagctgtgggctggtaattcccacccctgcatttgtgtcataggctgtgttcttgtccccaaccactgcttgcttatttatttatttttattttattttttgaggcagagtctcactgcgtcacccaggctggagtgtagtggtgtgatctcagctcactgcagcctcctcccaggttcaagcaattcttgtgcctcagcctccttagtagctgggattacaggtgtgcaccaccacacccagctaaattttttgtatttttagtagaggcggggtttcaccatgctggccaggctggtctcaaactcctggcctcaagtaacccacccgcctcggcctccaaaagtgctggaattacaggcgtgagctcccgtgcctggccaccaaccacctgtggattgagacactgctggtctgagacagaatccacagtaacagacgggtcatatttctccagtcctttcattgcccttcccaaagttgtacttgattgtccttgtttcaagaagagcaggttctatgcctttgactgaggaggggtagtggggtggggagcctgaagtactggtatcactggggacaactaaccagccttgtccttgtggcccccaggatagacgtgcataggaaggagaacgcaggtgcagctgaaaaagccatcagtgtgcactccacccctgagggctgctcctccgcttgtaagatgatcttggagattatgcataaagaggctaaggacaccaaaacgtaagtctccagcttttcttggatcttcagggtctgctagtccagttgagcctccccaactcaactttcaagcttttatacagacatataagaaatacagtcagcaattgcacaaaaagatgtaaactgagaaataaaatctttcttcttacaggactttgtcacctaggctggagtacagtggcatgatctcagctcactgcaacctctgcctctggatctcaagggatcctcccgcctcagccttctgagtagctaggacaacatgcatgcaccaccacgcctgcctagttttttgtgatttttgtagagatggggtgtcgccatgttacccaggctggtcttgaactcctggactcaagtgacccacccagctcagcctcccaaagagctgggattacaggcgtgtgccaccacaccccatcccttcttattcctgtcgtatgacctcctagaaattctgtgcactcacaggtgtgtgtatattgtgtctgcgtgcctgcatgtacggatatgtgtgcctgtgtgtattcacttgtgcgtgtatgcacatgtgttttagctcagagagaatcacactgaacaggctgttctatacttttttcattttctgtatcagcacatatattagtacatatggacagaccgcattatttttatagctgcatagaattccacagtatagctattcatagttcatgtaatcaatctcctatttcttgatgggtgtttaaattgttttaaacttttccttatcagaaaacagtgatgcaaggaatctgcttacacatgttcctttacacacttgtgctgtttaaaatagctttattggctgggcacggtggctcatgcctctaatcccagcactttggaggctaggagttctagaccagcctgggcaacatagtgaaacctcacctctacagaaaatagaaaaatcagctggacgtggcggcctgtgcgtatagtcccagctactcggaaggctgagaagggaggatcgcatgagcccaggaggtcaaggctgtggtgagccttgatagtgccactgcattccagcctgggtgatagagtgagaccctgtctcaaaaaataaaacaaattggctttattgatgttcaattgatgtataataaatcatacatatttttaaagtatgcagtttgataagttttgagatgttttacttggaaatgccaagtctggggtggcatggtgattgagtcttcatgaagcccacaattgaaggaactcttgtcttccacttcttcctttgtcttcccaagggctgacgaggttcccctgaagatcctggcccataataactttgtagggcgtctcattggcaaggaaggacggaacctgaagaaggtagagcaagataccgagacaaaaatcaccatctcctcgtaaggctctcttctatttccctgtttatgagtgggggatgcatgggggccagggtcagtatttcatcatggaaccttgatatgtgctcttttaaaatgggtgctccttctgcctcttgaagaaaaacagtcgaagtggtaaagagcatttaaaaaatccctgtaaggactggatctgcccattcccactgccatatggggcaggggtgttgtaaggtgctgcctctacagtccacgtccaaccacttcacagccctctttccctgtggctcgtggacagcctgcagctaggagccagggattcagggctttaggcttgtctgtcactgtgagaagtgaccttggcccttttctgtctgtggtgggctgctcctgcaagcagtgtgcttcgtttcatcagagactaacctgtgggcaaagtaattgctcttgtccaaaaaggtataggacatggattatgtagaatcaatggggaaacttggaggcacaaccataatctgagattggatccattgctaacagaggagtttgagttaggtgttggcatctccctccatcttaccccctgccctggttacaaactgggaacaccaaagactggggttgcagagttatttgccagaagttgaataggctgcagaaatggtgggcctgtgactcagctggcctctcgtctttgttactgccggggcctggtcctggcctgccagtgaaaggacacaactctgctctttctgccaggttgcaagaccttaccctttacaaccctgagaggaccatcactgtgaagggggccatcgagaattgttgcagggccgagcaggaaataatgaagaaagttcgggaggcctatgagaatgatgtggctgccatgagcgtgagtgctgggtagtaccctctgcttatcctttcctgagtcttagcaacagcagcttgtggggtgcagggtgatggacatgtgccctgtgccgtgtggccttggagctttagttgatgcttttggacttcgactatcagaaatagtatttaaatagtatttaattagcaaggattcttcacctggttcctagagtaggggtccaatcttgggctttgagtcctgtgattccaagtatgtgtacaatttgtgtttgtgtgcactttattgaaatgagggggtccatcgttttcatctgatttttattttatttttttgagacagggtcttggtatgttgcccaggttggagcacaatggcgcaatcatagcttactgcagccttgaccccctgggctcaaggaatactcctgcttcagcctcccaagtacctaggagactacaggtgtacaccaccatgcccagctaattttttaaaattttattttttggaaacagggtcttgctgtgtcacccaggttggtctagaactcctgggctcaagcgattctcctaccttggcctcccaaagtactaggattataagcatgagccactgcacacaactcatctgatttttaaaggagacttggggttggggtacaggaccaaaaatgtttagaatcagagtcctagaagtccaatggagctctgtctccacgcctttttctcatatagggggttatagtatagtgtcatgggtctatcgtctgtctccagcagtctgaacagccagagaggaaggactcctgagggtgtacaactgtttggcatttctggttgcaattgctagccgttagtccagtgagaacatcatatcacttaaaattccacacccgaagtgtgtaggtgagagtgtatgaaaagcacagaataggcttttgtggaaaagtatgtaattcatgtttttggcccacttgcctctggggctactcgccttttatacagcgggggtcacacacaagcccctgtcagggtgtgctgactcttcctcctcatctttcttccccagctgcagtctcacctgatccctggcctgaacctggctgctgtaggtcttttcccagcttcatccagcgcagtcccgccgcctcccagcagcgttactggggctgctccctatagctcctttatggtaggtggaagatcttattacacgggatccctgggcccatatgtggcctcccttaagggggactcagcatgctctgggagttggatgcttggcaagtttgcagggagagggaaggaaggtctcagaggcatccctcctctccagtgctcctagccactggctctgaggctcccaaatgtctgcctagaatgctcccggggcatagacagcactgttcccttactctctcctggcctcttccctttagccctactgggcataggaagagctaaagagctcacagcatcccttggcagcccagggtggcggtttggtgcctgtactccttcctccttgaggatgcaaggcaggggagtggagggtttctgggccatgctacttgggccccctggtaacaacgcctcctatcctggcagcaggctcccgagcaggagatggtgcaggtgtttatccccgcccaggcagtgggcgccatcatcggcaagaaggggcagcacatcaaacagctctcccggtttgccagcgcctccatcaaggtgatctgctctgtgggtcttcctgtttctggaaagggaggggtctctgcttttatcactctgcactttctcccatattccccctactcatttgagaattctgtgtgtcatatgagggacctttcccccatggaatcgaagtcctctttgtttttgatcttgcttggtccccatgggatggcttcagtgcttctgggttttcaggctgggcaggggcagggttataacatagaaagagaacttaggttctaacacaaactgatgggttcaaatccaagatccatctcatcaccccttcccccaatacactatatgatctgagcctcactttcctcgtcagtacaatattatgaggctacgcagccaaagcccttcgctcacatactaacaccaagtaagtgttagttgtctgtcaccttccctggccaaggtccaggggagagagaagggagaatctgtcatagtgaaacaaggatgctgttagagtttcacaaacctaaatccggttgctttagttgtcttaaaagctttgagcaaaaaccttgattgttctccagtggaggtgcagtcactgccctctatccgttggtcatttcatttgtgtccttgcctgttggcaagactccactgaaacctctctgggagattggtaggtggagggggcaggaggccctacttagaaagtgtcattgaagccaatccttctaactgaccacctctgccctcctaataattctggtgtgaaggcgtaatgatgtgggcttcagggtctttgttcttcctcccctaagtcttcagaatgggtagttgggagtaagggtggtagaaggggaactggatgaagtggacatggtgggggtcttcccatagagggtccctcattgactagctttttgctttttagattgcaccacccgaaacacctgactccaaagttcgtatggttatcatcactggaccgccagaggcccaattcaaggttttggtctttattgttttccaagctgaacatggaggaattgaggttgggtatttcccctgaggtaggaaaaaggctgggtcagtttcccgttagctgtcaagtcctcatcacatctttaagccttccatgcaggataaagggctgcagagctattttcaaattgacatcaaactggatttctgttgacttcgtcttccctttttaaggtccacagaagaagatgggaaggaaagaagtctgagggcatcttatttgcactctgctgtcatttctaaggaaggcctttaatgccaaattctcatcttttatgtccccactaaatcctaaggttcttgaacttctgatcagacagccaaaaaatgaaccatcaactagcttaacctaacatatgtgaggatagaggactgggacagctctctgggccactggagagtcagacaggcctgccctctgtgtgacttgattagttgccattcagggccttgaaatgctggtcagtgccacgtccagattccataggtctggtttgtagcttgtgaattagattcctctgggaactattttttcccttgggaagtgtttattcaattactcataactcataatctccacccagggtctccagtatgatagctaagcagaaggaatgctgacaagctgcccacctgagccttgcccttcacctgccttagatggttagcccgcctaggatggggagggcctgtgggccagaaaatatgggctggagcttcctttttcccacttttctcttttgtcacagatatatgaaccactgattaacaattacctcctcttctcaggctcagggaagaatctatggcaaactcaaggaggagaacttctttggtcccaaggaggaagtgaagctggagacccacatacgtgtgccagcatcagcagctggccgggtcattggcaaaggtggaaaaacggtgagctgtgagggccaggttgaaagccctgggccttggtctccaatctcagcagctctctctggtctcctgtactgctcaacctcaggactcctgatttgctcatttacttgattctactccccaagctcaggtcctgactcttccaggttctccccactagtcaccctggctcctccctccaaccccacccatgctttcttgatggcaccctgagctcctctctggccacccccaggtgaacgagttgcagaatttgacggcagctgaggtggtagtaccaagagaccagacccctgatgagaacgaccaggtcatcgtgaaaatcatcggacatttctatgccagtcaggtacatatggtgctcccccattgagggagggctgcaggagcccagggagcagagaagcagagactctatagaggttgaccttcatgacgttgacaagtcctggggcctcagccacatctgcctgcctctaggctaggttattgccctctttcaggtgcagaagtgggatgtgtagatgacatattacctcttattactctctaggaaaagtgatttgacaagtttaatgtacatatattgtgtataacattatatatataaataacatatatatgaatatatattatatgtaaatatatatatatatgttctacgttagtccctccctaacccctttctgcactggttaagaaagaagattagttttgttcatggaataatgataacagtactaacaccctggattgatggcatttttgaaatgtagtccctctgcctttcgcagaatggctgttctctccctggtttctgctcttccaccctcccattcctttcccagaactcatcattgccgttcagcactcggacaggctccagagcatggaagggaaggccaatatcaggttcaaattttgctgaacctcagcaaggcaagcaaacaggtggttggcagctaatggtgttttcctaaagtcttaaatccatcattgttagaactggaaaggaactttggagactgttgatcacagttcctacaattcatagaagatatccagatcttagcaggcttgtggtctgctggggctgctagagcaattggggcaaactggctcttggttttttggcttccagtgcccatatagtatagcatcaagtatgaaggttttggatccagggagctttgacctcaaacttcacatacatagcctttctgctatgtgaccttggataagtaactttctctgataaccctttgagaagtattaacaagaggctttagttacatctcaactatatatatatataaaataacaaaaaagtattaataagagccataataataataatatctaagatttatcgatgcctttgtatacccagcactgttttatgtggcttatgtatattaactcatttaattcccacaacaatttcattttataaatgaagcttaagagggtaaatgtgaatctttaattcagcgttttttttttaaagagagtaaaggatacctccaaagatgcataaagccaggatatattaatattaaacactgaagcaattttagctgatcagaatgagaattaaatgaaaagctatgtaaaacatcaagccagggttgatggagttggacctcttattgacttacacattattttcccaacctagatcaacttcctctttttttttttttttttgtgacagggtctcgctctgccatccaggctggagggcagtggtgtgaccacagctcactgcagcctctacctcccaggctcaagtgatcctcccacctcaggccccccaagtagctgggactacaggcaggtaccaccacgctcagctaatttttgtatttttttgtagtgatgaggtttcaccatgtggcccaggctggtttcaaactcctaggctcaagtgatgtcactgcttcagcctcccaaagtgctgggattacaggcatgagccacaatgcccagcctcagctgcttctttaaccaggaaaggaagcactcatttatggaaaggagacattctggtcttcattctatgaagtgaatcccattttgcagtttatttcctttataaaactttattcttagggaagaaccttttaagaaggaaataataaaagattgggtattttgtccatttttacagtgaagcttatgtatttatgctttttgactaacccatatctggactttattttttatttttacttttttttttttttgagatggagtctcgctgtgttgtccagggtggagtgcagtggcacaatcttagttcactgcaacttccgcctcccctgttctagtgattctcctgcctcagccactcaagtagctgggattacaggcgcacgtcaccacgctcggctaatttttgtatttttaataaagatggggtttcaccgtgttggccagtctgctctcgaactcctgacctcaggtgattcacccgcctcagctccccaaagcgctaggattacaggcatgagccaccgtgcacctggccatatctagacatattattccttttcctggggtattaaaatgaagcgtggatttgtgatgatgtcttctaagttacgaccctctacaacaggagtccccaaaccccgggccacggactggtaccgggccacacagcaggaggtgagcggcagacgagtgggcattacctcctgagccccgcttcctgtcagatcagggcggcattagattctcatgggagggctaaccctgttgtgaagtgctcgagggatgcgcagtgcatgtgaaggatctaggttgcacactccttatgagaatctactgcatgctgatttgaggtttcatcctgaaaccacttccccacccccacctccatccgtggaagaaaaattgttttccatgaaaccagttcctggtgccagaacagttggggaccactgctctgcaatatgtaatatatttctgcctagaaactctaggcattctgttttgcgtttggtaatgtttatcaactttgtcaagttttaaattctgatgaatggattgatactactgtttctccttccttcaagtcccccaaccccatctcccacttaacacccaccacgtttgctgtattttccaggggatactcaggctccactggaggcaaagaaatgtaaggtcaccccaaccctcattcttcctctttatctttcttctgagtcctgtgtgacctgttctgtttattgcctgtgtctggacctgatgacctctcttccgtggaaggctgtctccttggaggtctcacacccactctcttgcctgttcttgctgcagatggctcaacggaagatccgagacatcctggcccaggttaagcagcagcatcagaagggacagagtaaccaggcccaggcacggaggaagtgaccagcccctccctgtcccttcgagtccaggacaacaacgggcagaaatcgagagtgtgctctccccggcaggcctgagaatgagtgggaatccgggacacctgggccgggctgtagatcaggtttgcccacttgattgagaaagatgttccagtgaggaaccctgatctctcagccccaaacacccacccaattggcccaacactgtctgcccctcggggtgtcagaaattctagcgcaaggcacttttaaacgtggattgtttaaagaagctctccaggccccaccaagagggtggatcacacctcagtgggaagaaaaataaaatttccttcaggttttaaaaacatgcagagaggtgttttaatcagccttaaaggatggttcatttcttgaccttaatgtttttccaatcttcttccccctacttgggtaattgattaaaatacctccatttacggcctctttctatatttacactaatttttttatctttattgctaccagaaaaaaatgcgaacgaatgcattgctttgcttacagtattgactcaagggaaaagaactgtcagtatctgtagattaattccaatcactccctaaccaataggtacaatacggaatgaagaagaggggaaaatggggagaaagatggttaaaatacataataatccacgtttaaaaggagcgcacttgtggctgatctatgccagatcaccatcttcaaattggcacaactgaaatttccccactctgttggggcttccccaccacattcatgtccctctcccgtgtaggtttcacattatgtccaggtgcacataggtggtattgaatgctcagcagggtaggggctgaccactgtccctgattcccatcgttctcaggcggattttatatttttttaaagtctattttaatgattggatatgagcactgggaaggggacgctaactccccttgataaagtctcggttccatggaggacttgagtggccccaaaggctgccacggtgccctcaccccagcccatgtgctcccataagggctggttcctagaggcaggggttgtggggcactcccagccacggcactgttaccttggtggtgggacttggaacccaaccctgagctcccgataaagctaaagtccatcatctggcaaattcagtaaattggagagtacttgcttctgtttgtatctgagaggaatttttaactgacggcttctgtctccatgaatcattatcagcatgatgaaaggtgtgtctaaaaaacaattcagaataccagcagcattgtacagcaaggggtaaataagcttaatttattaatttaccaggcttaattaagatcccatggagtgtttagcccttgtgggagacagaagccatcagttaaatgaggttaggcctctcctcctaatatactgattgacaatgcatattagccaggtaatgcactttagctaccctggacaatgctatcaagtgtgctgggaagggaggaaggcctctctacatatggaaaagcccatgcgtggagttcccctcctttcaacattgcaacaacagtaacaacaagacaaccgcaacatgtgggcgtagtcaggcaatgctgtgtgcgaagtaaactacctcaaggtatgaagttacctcagcaattattttcctttttgttccccccaaccccattaaaaaaatttttttttgatttttgtttttttgcagcttgctgatattttatataaaaaagaaaagcaaagcaaaagagaagctgatagtcttgaatattttatttttttaatgaaaagaaaaaacaagaaagttatgtttcataatttcttacaacatgagccagtaaccctttaggaactctctatggagaacaggcctggtgggaaaggctttgggggctgcccccttaggaggaggctagtgctaagagggaaggcccaggtttgagagagcccagaggggcagagcccagagccttgtttggccctgatctctgacttctagagccccagctgctggcggctgctggaatatcctacctgataggattaaaaggcctagtggagctgggggctctcagtggttaaacaatgcccaacaaccaaccagctggcccttggtctcctctctttcctcctttggttaaagagcatctcagccagcttttcccaccagtggtgctgttgagatattttaaaatattgcctccgttttatcgaggagagaaataataactaaaaaatataccctttaaaaaaacctatatttctctgtctaaaaatatgggagctgagattccgttcgtggaaaaaagacaaggccaccctctcgccctcagagaggtccacctggtttgtcattgcaatgcttttcattttttttttttgttattgtttcatttcagttccgtcttgctattcttcctaatctatatccatagatctaaggggcaaacagatactagttaactgcccccacctctgtctccctgtcttctttagatcggtctgattgattttaaaagtggacccaaacttagggaattcttgatttagggtggctggtggcaaggaggggcaggggatatggggacgtgactgggacaggttcctgccttatcattttctccctaggacattcccttgtagcccccagaattgtctggcccaaattgaatagaagcagaaaaacatttagggataacatcaggccagtagaattaagcctctccacctgtcccaaccataaaaagggtctcccagctttccatctctggctctatatgctttatcccaaaacaaagcagataacgttcagacgtcggccatttagtaatttaaagcgaatttccagcagcaagcatgctttgatatctggttcagactatcatcaggaagaaaaaaaaatcccacagtacctgaaatgtgattgttgcagtgttcagtttccttgggggcctgctcccttcacaccttgagcccaagtccttttccgttggctgattcagctcccagaagagacgaggaagtgtgtggcaagggactggaaaacttcacttgcttggattaggcaaggctccactcattgttgatatttgcccagcaggaaaatcatgtaagttataccaccagaaagcaaaaggagcatggtttggtggttaaggtttagtgggatgaaggacctgtcttggtgggccgggccctcttgtgccccgtaggctaggtcttagggcaactccttgccctcctgctcagcacctccatttccccatccttggtgagataacaagctatcgcgaaaagcacttgggagatttggatgatttgagaagagtgacttaaaaaaaatgcttctgtgctctaagatatatatgtgtgtgtgtgtgctacatatatatttttaagaaaggaccatctctttaggatatatttttaaattctttgaaacacataaccaaaatggtttgattcactgactgactttgaagctgcatctgccagttacaccccaaatggctttaatcccctctcgggtctggttgccttttgcagtttgggttgtggactcagctcctgtgaggggtctggttaggagagagccatttttaaggacagggagttttatagcccttttctactttcctcccctcctcccagtccttatcaatcttttttcctttttcctgaccccctccttctggaggcagttgggagctatccttgtttatgcctcactattggcagaaaagaccccatttaaaacccagagaacactggagggggatgctctagttggttctgtgtccattttcctctgtgccaaagacagacagacagaggctgagagaggctgttcctgaatcaaagcaatagccagctttcgacacatacctggctgtctgaggaggaaggcctcctggaaactgggagctaagggcgaggcccttcccttcagaggctcctgggggattagggtgtggtgtttgccaagccaaggggtagggagccgagaaattggtctgtcggctcctggttgcactttggggaaggagaggaagtttggggctccaggtagctccctgttgtgggactgctctgtcccctgcccctactgcagagatagcactgccgagttcccttcaggcctggcagacgggcagtgaggaggggcctcagttagctctcaagggtgccttcccctcctcccaacccagacataccctctgccaaactgggaaccagcagtgctagtaactacctcacagagccccagagggcctgcttgagccttcttgctccacaggagaagctggtgcctctaggcaaccccttcctcccacctctcatcaggggtgggggttctcctttctttcccctgaagtgtttatggggagatcctagtggctttgccattcaaaccactcgactgtttgcctgtttcttgaaaaccagtagaagggaaacagcacagcctgtcacagtaattgcaggaagattgaagaaaaatcctcatcaatgccaggggacataaaagccatttcccttccaaatactcgacaatttagatgcagaacatttctctgtattcagacttagagtaacaccagctgaaaactgcagtttctttcctttggatacataaggcttctctatcggggtacgggacagggaggaggcctcatgtctgaagggggatttaggggcgagagccccagccctgaccctcggtcctgtgcaccgctttggggcacagtctgatggcgcctttgctggcgccttagtatggttgactccggatggacaaaagaaaaaaaattttttttcttgaatgaaatagcaggaagctcctcgggagcatgtgttttgattaaccgcaggtgatggatgctacgagtataaatggattaactacctcaatccttacagtaagattggaactaagggcagggactcatgcataagggtatgaatcccagccaggacaagtgagttgaggcttgtgccacaaaaggtttgtccttggggaacaggcaggcctgccaggatcccccccatatcgattgggctgggagggctggccatgaggtccccactttctgctttccttgcccatgtgtcacccctttggcctccagcttgtccctctctcactttctatagctttgttggaccagatggtgaggaaaggaatggcctcttcccttctagagggggctggctggagtgagacctggggcttggcctggaacccaccacacagccccaaagtcaggaagcctggggaaaccagagctgagacctcttcaacagggtttctttgagatcctacacctccattgggccctttttcagtcttcaatgggggcccagttggctctagaaggagaagaggtgaagcaggatcctttgccctgggggagtctgagggcgcggtccttggactcattcaggccgtctttgtagttgggggagttccactgggcgatcccagcccctccccacccaccctctaatggacctcctcatagaagccccatttcacttttgttttatctacctcttagcaaaacaatagataaattaggtagtggcagctccacttgcttaggttagggggggaaaaagatttctttttccaaaggaaaaaaatattaccttgagaatactttccaaaaaataaaattaaaaaaaaaaaaaccaaaaaaaaaaatttttttttaaaagggagacattttccagtgaccactggattgttttaatttcccaagcttttttttcccccataaataagtttcactctttggcgattttcttcacttgtttaagataacgtgctagctattccaacaggtaacagctttcacagtctgcccctggcctgtctcaccccatcccccaccctattcctgccagtgagtccttcctgtgcttctctcccttctcccctcccagccagctgacttcagtcacccctgtcccccctcccctgccaataagctcccccaggaataaaggctttgttttggggatgcttaaatcttgactggcacttcccggctgtgggggctggggagccacttgtaacatttctgtgcagattttatgttagccactgctatgtaaaagcacgttcaaaatgaatttcagcagattatgtgttaccataatgaataaacgtcctctatcaccatttggagtctcccttttctccaggatcttgatcctggtccccaaaaccagagtgaatcaaaagagcttcctcccctgaggcaaagtggatttgtaagcagttctgaaacatcacttactcagaagagggaacgatgtattttgatgagtgcaaattgggaagagctggaggcctactgcttgggacagttttttttttttttttttttttaaatatgagtgctagcttattctgtaattgcggcaactttgaaaattgtattttactggaaatctgccagccatcaccacccgattttgattgtatccttcctcccatcctttaatctgttcattgctttgggggaggtggggcagctggctcacacgttggagtttgttctttgatggatgaacgaacactccagttttctttcccgtgaaggttgtttcagccacaaaccacttcattttgctgtttcaatttcaaaataaaaggaaacttatattgaaagacaagtatgtctgtgtctcagggtttttgggtctgggagctgagatgctcagcctcagcatgggagccctggttctcagggacctgagtcatccaaatgcaaagtaggcatttttcttaaatgtacagaggagtggtttttaaatggtgccctgctcttaattagctttgcatattgggaggggggcaggtcaggtgtttggaatgaggactccagcattaaagaagatgttgggacatcactgcagagaagtagctgtccaagaagtgacgagggtgtgtcactcttcctaacacctaccctaagaaaaaaacatgtaagtgacttgtgtttctgggtttcctgtaaagggaaaggtctattctgaccctgccctctccatttttttttcccccaatttggggttttttgtttgtttgttttttgagggtatcactctgtcacccaggctggagtgcactggtgtgattttggctcactgcaacctccacctcccggttcaagtgatttctcctgcctcagcctcccaagtagctgagactacaggcatgtgtcaccatgcctggcaattttttttttttttcttaagacagactcgctgtgtcacccaggctgtggagtgcagtggtgcgatcttggctggctgcggccttcacctcctgggttcaagagattctcctgcctcagcctcccgagtacctgggactacaggcacctgccaccatgcctggctaatttttgtatttttagtagagatggggtttcgccatattggccaggctggtcttgaactcctgaccttgtgatccgcctgccttggcctcctaaagtgctgggattataggcgtgagccaccgtgcctggccacctggctaattttttttttttgtggaatgagttttcgccatgttggccagtctgatctcaaaactcctggcctcaagtgatccacctgccttggcttcccaaaatgctgggattacaggtgtgagccaccacgcctgccctaaataaatattttaataacatgattaagatactcttaattcattaggccgggcgcggtggctcacgcctgtaatcccagcactttgggaggccgaggcgggtggatcatgaggtcaggagatcgagaccatcctggctaacaaggtgaaaccccgtctctactaaaaatacaaaaaattagccgggcgcggtggcgggcgcctgtagtcccagctactcgggaggctgaggcaggagaatggcgtgaacctgggaagcggagcttgcagtgagccgagattgcgccactgcagtccgcagtccggcctgggcgacagagcgagactccgtctcaaaaaaaaaaaaaaaaaaaaaaaaaaaaaaaaaaagatactcttaattcaaatcatcagtccaaatatacttcctgctgactactgaactgatccattaagatcaagaacaaaaccccaaagatactacataactatattttgaagtttatgggcaggacaat

SEQ ID NO: 277 - DNA, 163167 bp, Homo sapiens
  source 1..163167: mol_type = genomic DNA
gtgtctaggttttttataactggcaggaagcaggcctacttttgctctgatggtttctcacttttgtcgctattaacgttttggaccaggtaattttgcatgtgggggaggggtgtctcttgtgcacggtacgatgtttagcagtatcctcccttctccaattgtgacaatcaaaaatgactctaaacattaccattattacctaattgagaaatgctgctgtaagcaaagctgccctttgccctggagggaggcagtatctttctgttaagaatattcacgatacaaacattcttggatagtcaaaacaaaaggcagtcagtgtttttgcacaaaagatgtgcagaagtgtgttacccatggagaattgtcaccgaagagaatcctgacaccattagtctctttgataaagttactatcaccagcaatgttatatattgacatatgcctcctgtaggtacactgagaaaggcatagcatcacttctgtggtatttttgctgggatggagtccacagtgatgctaatctgggaaccacacttgagaaccactgctttattcctagagttagccagtgtgtgttgtaaggtaagaataaaagcaaatgaactattccttcattgtatctcttatctgtccctgacaggcagcatggtgattcatttgatgcttccagaaaccagagaaatctatgaattagagaaattatggaccctacgttcttatgatgaccagttagctcagatagcacctgagacagtacctgaagacttcattcttggaatagaagatgatacttcatctgtgactccagtggagttaaaatgtgaataaaatattttatgcactgcgttagtcatttcagatttggattgagtcacttattggaaaatacagctcctaaagtccgtctccttggttaggctgctcttaggacaaggcttgtgtacctcatgggcactcctgctaactggcatgcagagactgtcgataagtgagctatacctgcaaccaaaaatcagtacattctacccaaaacttatgacacgctgcctttatcctggaaatgtcatcagaatttcctggagttagcactggctcctgtgcttgacttctctgctcagatttttattaatttaatttagcttaaatgtaaatcttaaccctgtttgtttaatggaatggcaaaaattttaaaaaataatataaaacatagcccactggtcttatttttatactttgaggtgataatattcttctaggaggacttctgtaacccttccagaatactccagtaacacaagaaagtaaacaaagtgtttgttaggaaaaactctgaacgctctagttcttagttcatatgcaagagtattatcaaggttcacattaagtaccatggctggacatggtataacagaaatctgcgtagagtttgaaaaaaaattcagaacattcccattcaattgaaaaccaaaaataaaacatactacacaacaagctgcacctaaatgatgaaaaaatttattctgcgtcaaggtatctggaaaatgaagctgcatttggggcacattatacatgaggaatgatccatatatggtgagtacaaaactcaattatagaattatttcttagctagtaccagatactccaaattacaaatgcttaagtaaaagtaaaatatgatttgccatactaaaaggctagaagtgaaatatgacagaatttaaaccagcagatataaatgcagcacctatgtgtatatttttaaaaaatcaaatattggggaaaaaaatcaaatactgagaaaagctctggccttaaacacatcttacctgaaatccaaccagaaagccagtccatgattttagcaattttaattcattgtatgaaaaaaaaatcatgaatgctaggagaatccagtgacaaaaagggcacttttttggttaaaactacaaaagaaacttgttttcagagaacattaaggaaaacactttaaatcattttcaaaatgtctaattgatcttcagaaaaacatctagtctgtatagaaattcatcttgaaataagaatgaggcagtgattttttttttaaagggttatatatatgtcctttagatcagtgtaacatgactgtgatcatcttacaaacaaaactcaaaaaatcaattcagagagcagcgtggccttggagaccacccacacccaacacaattgtacgtactgggctttgctgtcaaggagtgagcaaatgagttcgttatcaaaggtcatatgttttcacagtcattcaaattatatcccaaaaacttttcttgtattctctatcttttgacttttttttcaaagaactgattgcacagtatacagaaatcctgttatactttactacttaaggtggagtctaattttttttttttaatttatcagtgcttaaaaatcttcaaaatagcttagtgaggctcatgacagtgctggccccatggaaatgtagccttttgttgcgtttaaacactgtcacaccatctatgactgtcccattggtctgaagtgtagtggcaaactaagcatcctataagacaagctaaagcttgctttttgccagtcagttgaaagtcttgcatctcttcactgatgcactttctttaggtattgatagtcagaagcacaaagcatttattatgcattcaatcatgtagctaaacaaaaaactgaagtctcctgaagccatttaaaccagccgttccaaaatctcctgcgaccactttgttagtaccgtcaaaaactttcccaactataaatgaaagaataaatggtagtgctgctctccagatactaggcactgctccgtatttttgaacatttgatttaactaataactgtgtcaaaagcctcaaaaaaccctgaaattaattttccagctttactgtcaccagccagaagtaaaaatcttaatttgcctgttagctgattgctgttaaattttaaatttattttttaaaaaacggttggacttctatcattataaagtatataaaattttcaaaaaaaaggaacaattttgcttttcattgtattactgaatacctgaggtagttgagtaaaaatgcacgtttaatacccctgccaacaccattcagcacttcccttaggttactcatgttagtgttaggtaaaaataaaactgagaacagtttttctatgctaatggcttaacatttaagttcctgtgataattattctgatccaattttaacaattggatttaggagcaatctatttgatgaatttagtgaaagcatcattaagccaatttctggcattatgggggaatattaagaagaattagaatatctgttatactgtgagactacaacaaagggaagtgcagagctcttctctttccctccctcccccaccctttttttgtttgtttgtttgtttgttttaaagctgggtgtcatacatttcagagagcataaagtatacattctcacagagacaggagttcaaaagttgcctggtcctcagaaacaactggctaggtaaaaacttgtgcatgtgattctggatagggggtcagcgcccatctgttggttaagcaatctgtctttggtttggcatctgcctctgtggtgggctgtttcctgagcctttacttccgtcttgactgaggtggtccactttgcagagccttctgttgttggtgctgctttacctgagtcagaatttcctgaatttttctctgggcaacctagaaaaggacagagctttgaaattccacttgatcaaaagctactaaaagttattgtactccttcatttcaacaatttcaaatagaaatccatttgatgattaaagatacatactagtcagtttgctagtagtctctgaaatcacccgctaaaagggagatgaaaagtcttaagcatcaaacaaccttaactaattctatcaggtaggagcacctgtgggagaattgcttccacgtgagaaagatacaatagcttattttagagcccacttgcctggcaagcatagaagtgaccagttattttgacaaccacttggtcattctcatcaggtgtctggtcacgagggacaacaacttctgcacttgacaaattctgaagttcattcacctgaaagagataaatataaatcacattaagtggcagttttaaaaccttacttcctaagcacttactgtgcgccagacagtgagctatgtatggctttacaaatttcatttaatccagtggtaattccatgaggttattagaattatccccacttcaagatgattaaggctcatccaaagaaactgatttgtccagttatacaagtgaatggcaaaaccagattcaaatcctgagtctgattccaaagtgtatgtactcaatcacttcaaaattataaatagctttgaaacccacttacaagttatatgtattagagactagaaacagtttgctttttttccattacagatgtaacaagctgtagatgaaatttttaaaattcctgttaagtgtctgttccataaaaagctaaagttttatcaggagaacgttaaatgccctttataaatataggacaatcctctcacacaaagtgatctgaaagagatgcattactttcactaatagctggcaccaacactcagacaggaaacaaaaggcaatcttctccaaaccttggtcaagatggtcctgctttttataaattagccaaaattcggggacttggaactcctaagtacctttcaacgctttccctttcataccactgcacaggttttgctgaagtacttgccgttttgcctccttttccaataactctgccagcagcaaaggatggcactctgatatgagcttcaagtttcacctcttctttaggactaacaaagttttcttctttaatttttccataaattcttccctgagcctgcagatgaaaacacatcctattagtgtcattcatgtatgaaatggaaaaggtcagttaacttgaaagatggcccaaatccaagtgggatagccctttgcagtgatacatctacatttcatagattgttgaaaataacatagaagagagcagttagaagtcctaaaaggttgacaataactactgcccatcacagtagaggcaactgaatgcttggtgaaagaaggataaaccatattcttctgatgaaaacagttaaaggcaattaataacctaataaaaacgaatttttgtgggcaaatggccattcgtactaaaattgtgataggtaaaacttctcatgctggccatgagacatcagttgcatttttctttcctttttgttggagtcagggtcctcctgttgtccaggctggagtgcaatggtacaatcatagctcactgcagcttcaacctcctgggctcaagcgatcctcctacctcagcctcctgagtagcagactacaggcatgcaacaccacacctgacttattttttttttttttttgagacggagtcttactttgttgcccaggctggagtgcagtggcacgatcttgggtcactgcaacccccgcctcccaggttcaagtgattctcctgcctcagcctcctgagtagctgggactacaggcactagccaccacacctggctaattatttttgcatttttagtaggcatggggtttcaccatgttggtcaggctggtctcgaactcctgacttcaagtgatgtgcccacctcagccttccaaaagtgctagaattacaggtgtgagccactgcgccactaatttttatagagatgggggtcttgctatgttgccacgctcatcacaaactcctgggctcaagagtcctgccttggcctcccaaagtgttggtattaccagtgcaagccaccacacctggtcacattttttttgagcaaaagagacagaactgcagagtcagctatgccaagctcactaaaagtcaagctcacatctacatgggccagttagaaacctgctgagaaaaatgttttcaatttaaatgtgtttcatactcttagaaaggtggtttttcctttgaatattttaaagaggctacaacatcaaggtaagacacttttttcttttttgagacagagtctcaccctgtcatgcaggctgaagtgcaatggcatggtttcggcttactgcaacctccgacccccgggttcaagccattctcctgcctcagcctcccaaactagctgggattacaggtgcccgccaccacacccagctaattttttgttgttattttagttgagacggggattcaccatgttggccaggctggtcttgaactcctgacctcaggtgatccacccaccttggcttcccaaagtgttgggattatgggcatgagccactcactgtgccctgccttttatttttttttatttttttattttattttttttagagacagagtctctttctctgtggtgcgatctcagcacactgcaacctctgtctcctgggttcaagtgactctcctgcctcagcctcctaagtagctgggattacaggcatccaccaccatgcctggctaatttttgtatttttagtagagatggagttttgccatgtaggccaggctggtctggaactcctggactcaagtgatctacccacctaggcctctcaaagtgctgggatagcaagcgtgggccaccgcgcctggccaagacacttctgatatttagagtcaatacatcctatcacctactgcatgcaactatataaacaacctattatatataaacaacctattacatacagcaaagcagaaaggagcctgagagttggtttgacaagctgccagggtaaaccacaaaaaacaatagtacccaacacgcgttcactgattcagaaagctgagctcattttagggcactaccgacaaaacaaaattcatcttgataccctatattccaatgatccttaatgcctcaggccaatgacgtagatattactattacttaagacagtcaaaaagacactagggatatacactatcctccaaaactgaagctcttgaatttgtaaggaaaaatacggggtaggtggtttaccattccttagatctctaaagtaaaacattcatttagcattgtcaccaatcacataaataaaatttaactactatggcttaagtgttacatttaagttaactataaaacatgagttttattagtgaatacagggaaagaactttgaagttcctatcatacaaacatcataggagttgcaggacagtaattctacttataagactaaaagctcagcaccaaggaaagacatgtttgtatttatcttttaagatttcaaactaaaagtgaccctgagagtttgggataggaagcagttttcaacaattctgagttaagatttgaactgcctggatcacaaggctgctgtgaaggaataaatttcttcacatgattttctttcttcacctaaccacccacatctcaaagcacctccttcgtttcccattcttcacataagtgaaagcagctttgggtttttagtgaaaaaatggcccagagaaaatagaagtcaaagaaagtgattttttttgtttgatttaagggagagaggtggggtggggagagaactgtatgcactgttactagttactgttacactttaaggctaaaaaaactaaggcttggccaggagcacagtggctgatgcctgtaatcccagcactttgggaggctaaggtgggcggatcacttgaggtcaggagtttgagtgtgtggccaacatggtgaaaccccatctctactaaaaataaattggctgggcgtggcggcacatgcctgtaatcccagctactcgggaggcggaggcaggagaatcgcttgaacccaggaggtggagtttgcagtgagctgagatcacgccactgcagtccagcctgggcgacagagtgagactctgtctcaaaaaaaaaaaaaaaaaaaagagaaaaaaaaaactacagcttaaggttaaatagttgtcttcttacacagccactaaatgttctaagacaagacacccatactaaattttgtgggagaaatcatacactaaaaggaatatatttatgaatttggcatggtcttagtctgattcatccatagtctgttgaatacccccagcacgctaattttgtgctgcccatgtgttaggcacttttctaaacatttcatatattgtgtaaaccttaaactaccttaggatgtaggtgctcttatccctggttttacagaaaaaggttaagtaacttgcccaatgtcatacaaggcaaatggcagagctaggatttgaactagcagcctggctgccaagtctcagctctaccatctctcagtagacattgaaaggcacactgcagccccaaagacctcaaatcccactaaacgtgcaatggttcataccagaacaaatgctacaagagctcctgccattcctatctctaagatcccagggattagagagatttgtagagtctatgggcagggtctaacagagataatccaagggtaaggaaaaagggggcattttaattcaagtctaggcaatctcagggacaggagggaaaacatctgaaaacaagtttccaaggcatattaacctggcaggtttgtaaattttaaggtctcaccttagcataggattacaaaccattaagcaaaattaacctttgagagacaggtaaatccagcaaccagtacagaactcttaaaattaaagacttttggttaatttcgaaatataattttgagtgtgattctactcagctcttagataagaatttccattgactctttctgagatttagacatatttaagggagacgccaggttatggactacctgtgcatttgttacctgtggacatagcacatactctagagcacataccttgaactgagcctctggtggtccagtgataatcaccatcctcactttagcatctggtgcttccgctggagcaatctgtaacagacccaacaacaagttatgatactttcaggtatcactgataggcatcttgggccaaccagcctaacatttgcatgtgactggctgaaatgcagaattaaagccttcgtgaaggaaattagggagaggcagcaattcctgtgggttcacaatttaggcctccctcctgcatatactatatgcttattctgtgccgggccctaatggagacctccacgtgctgtctctcagctaatcctcaccacgtcctgatgaagtagtattacctccacttcacaaatgcggaaatggaaggctggagaaattgagttatctggaccatgatcacacagctaacagagctagagggagagctgggtctgtctccattgcctgtgttcactacaccagtggtgctcaaagtatggtccttggcccacttgcatcagggctccttgggcttcctgtgtatgcaacacactctaggaatctctgtaccctaagtttcaaggatactgcacaccacatgcctttgtttgtctgaggcagggtcttactgtgtggcctaggctggagtgcagtggtgtgatcatagctcactgcagcctcaaccacccaagctcaagtgttcctcccacctcagcctcccaagcagctgggactacaggtgtgtgccaccatgcctggctaattacacttttttttttgtagagatggggtctcaccatgttgcacagtctggtcttcagctcctggggtcaagcaatttgcctgctttggcctcccaaagtgctgggattacaggtgtgagccaccgcacctggccaacctttattttccttaaataaggcatcaaaatacagaatcttcagaacacacagttatctattacggcagacaccattatttgtcctctggtatgttaccttctgtagttacaaaatgtttagctgactgtgcatagcctgtattttgccccttcaacttcgtctggccaagttctgggcaatggaaatataggtagaaatatcccacagtagctaacaagaaacctccctagaagaaaagctctttattatgttctcctctcctactggctgggcaacagacctgattcctggagcactgaatggtgtcaatctggaaccaagagggaccaaggccgtacctggggaaggtggcttggaaggaacttaggtccaaggacttggtgggggcagagccaacacccagcccggatgttcacctcctaactgtgttttctgcacagagaagttagcctccttggtgtaagccactgttgtttgggggtttcttcatatccttatgtaaccctaacagtgtcttttacattctattcaaattataaagtggcaagaagattcatatttctgtaacttacttaaagaaccagagaaccacagctggtagaacagtaccttaattgaagctccagcaaagcgagaaagctgcttgatgtgctggccctgcttgccgatgatggcaccgactgatagagctgggataaacagatgaacagtctccgtttctgattgctgttagaaaagaaagccaggacacccatgtttatttgctacaaatcaggcttttgttaacattagctttaggaaggacaccttctcatgcagtaggaataccaggaaagtttaaggaaaagctaccataagaagttgaccagaccttacctaataggtcaagaagatctcatacagtcatcctgaaaacagtggtatttaaaatttcacttttctctactgttgccttaaactttaaaatgtcactgagttatggatttaaaagatatgtagatgttgtaaagtttaatcatattagaatagcgggacatgcttgcattaaaaattaagtaagagccccctaccactctcaaggtagattcttaacaagtaaatgaaattctgggctacatatcaaacacaacagaactcaaggacgccagctccacaccttatctatgtaggtttcactccttaaacacatacacagtgaagtgtttaagagaaaagctgaattttgttacatatgactaaattgtatgaaaccttaccactgtcattcaatagttatcacatccaagcacaggacaggattaggagagagctaattcactttagtggtaagatgccctaagatgctttcccacagaattccttattccttccatctgtgccttccctttgctttttttttgagatggaatctcactcttgttgcccagactagagtgcaatggcacgatctcggctcactgcaacctccacctcccggattcaagctactctcctgcctcagcttcccaaggagctgagattacaggcacttgtcaccacacccggctaatttttttttttttttgtagagatagggtttcaccatgttggccaggctggtcttgaactcctgacctcaaatgatccacccgccttggcctcccaaagtgctgggattacaggcgtgagccactgcgcccagccccctttgcattttatacatgaaaaaattagaaaatattttgtaggctaactcctgaaaggtcattcataaatagattttatctatgtacctcattccttcactacttcccacttcaagccagttgtgcccttcctgggtctcttttcaaatagtccttgcagggataaaggacacatttgctcaagagttcacagtgactgggctcctaaaaaggccaattcaaggttcaaggttcagtaatgctaccagtcaactaacagttctaaagtacagaagcagtgcacataatttatgcattttccactttgtttaccttctaacaatatagtgagaaaaacacttccaaggataagctagttccaagacacatattacaagaaatagttattgaaatgagccacaactgaagaagccagtaatatgcttttgtttaaaaaaaaaaaaaaaaaaaaaagccaggcacagtagttcatgcctgtaatcccagcactttgggaggccaaggtgggtggactgcttgagcccaggagtttgagaccagcctgggcaacatggcaaaaccccatctcttcaaaaattacaaaaattagccaggcatggtagcgcttgcctgtggtcccagatactcaggggaggctgagatgggaggatcacttgagcccaggtggttcaggatgcagtgagctgagatcacaccactgctctccaacctgggtgagagtgaaactctgtctcaaaaaaaaaaaaaaaaaaaaaagaaaaaacaaaaaagaaaagaaaggaaaaacccagtatgtatacccaatcagcaaatgtttctagaaatattagaagatattttgtcgggagggaggagccaagatggccaaataggaacagctccagtctacagctcccagcgtgagcgatgcagaagacgggtgatttctgcatttccatctgaggtactgggttcatctcactagggagtgccagacagtgggcgcaggtcagtgggtgcatgcaccatgggtgagccgaagcagggcgaggcattgcctcactcgggaagcgcaaggggtcagggagttccctttcctagtcaaagaaaggggtgacagacggcacctggaaaatcgggtcactcccacatgaatactgcgcttttccgacgggcttaaaaaacggcacaccaggagattatatcccgcacctggctcggagggtcgtacgcccacggagtctcgctgattgctagcacagcagtctgagatcaaactgcaaggcggcagcgaggctgggggaggggtgcccgccattgcccaggcttgcttaggtaaacaaagcagccaggacgctcgaactgggtggagcccaccacagctcaaggaggcctgcctgcctctgtaggctccacctctgggggcagggcacagacagacaaaaagacagcagtaacctctgcagacttaaatgtccctgtgtgacagctttgaagagagcagtggttctcccagcacacagctagagctctgagaacgggcagactgcctcctcaagtgggtccctgacccctgacccccaagcagcctaactgggaggcaccccccagcaggggcacactgacacctcacagggccgggtactccaacagacctgcagctgagggtcctgtctgttagaaggaaaactaacaaacagaagggacatccacaccaaaaacccatctgtacatcaccgtcatcaaagaccaaaagtagataaaaccacaaagacggggaaaaaacagagcaaaaaaactggaaactcttaaaaagcagagtgcctctccttctccaaaggaacacagttcctcaccagcaacagagcaaagctggacggagagtgactttgatgagctgagagaaggcttcagacaatccaattactgtgagctacgggaggaaattcaaaccaaaggcaaagaagttgaaaactttgaaaaaagtttagaagaatgtataactagaataaccaatacacagaagtgcttaaaggagctgatggagctgaaaaccaaggctcgagaactacgtgaagaatgcagaagcctcaggagccgatgtgatcaactggaagaaagggtatcagcgatggaagatgaagtgaatgaaatgaagcaagaagggaagtttagagaaaaaagaataaaaagaaacgagcaaagcctccaagaaatatgggactatgtgaaaagaccaaatctacgtctgactggtgtacctgaaagtgacggggagaatggaaccaagttggaaaacactctgcaggatattatgcaggagaacttccccaatctagcaaggcaggccaacattcagattcaggaaatacagaaaacgccacaaagatactcctcgagaagagcaactccaagacacataattgtcagattcaccaaagttgaaatgaaggaaaaaatgttaagggcagccagagagaaaggtcgggttacccacaaagggaagcccatcagactaacagcagatctctcagcagaaactctacaagccagaagagagtgggggccgatattcaacattcttaaagaaaagaattttcaacccagaatttcatatccagccaaactaagcttcataagtaaaggagaaataaaatcctttacaggcaagcaaatgccgagagattttgtcaccaccaggcctgccctaaaagagctcctgaaggaagcgctaaacatggaaaggaacaaccggtaccagccactgcaaaatcatgccaaaacgtaaagaccatcaagactaggaagaaactgcatgaactaacgagcaaaataaccagctaacatcataatgacatgatcaaattcacacataacaatattaactttaaatgtaaatggactaaatgctccaattaaaagacacagactggcaaattggataaagagtcaagacccatcagtgtgctgtattcaggaaacccatcacgtgcagacacacacataggctcaaaataaaaggatggaggaagatctaccaagcaaatggaaaacaaaaaaaggcaggggttgcaatcccagtctctgataaaacagactttaaaccaacaaagatcaaaagagacaaagaaggccattacataatggtaaagggatcaattcaacaagaagagctaactatcctaaatatatatgcacccaatacaggagcacccagattcataaagcaagtcctgagtgacctacaaagagacttagactcccacacattaataatgggagactttaacaccccactgtcaacattagacagatcaacgagacagaaagtcaacaaggatacccaggaattgaactcagctctgcaccaagcagacctaatagacatctacagaactctctaccccaaatcaacagaatatacatttttttcagcaccacaccacacctattccaaaactgaccacatacttggaagtaaagctctcctcagcaaatgtaaaataacagaaattaaaacaaactatctctctgaccacagtgcaatcaaactagaactcaggattaagaaactcactcaaaactgctcaactacatggaaactgaacaacctgctcctgaatgactactgggtacataacgaaattaaggcagaaataaagatgttctttgaaaccaacgagaacaaagacacaacataccagaatctctgggatgcattcaaagcagtgtgtagagggaaatttatagcactaaatgcccacaagagaaagcaggaaagatccaaaattgacaccctaacatcacaattaaaagacctagaaaagcaagagaaaacacattcaaaagctagcagaaggcaagaaataactaaaatcagagcagaactgaaggaaatagagacacaaaaaacccttgaaaaaattaacgaatccaggagctggttttttgaaaggatcaacaaaattgatagactgctagcaagactaatcaagaaaaaaagagagaagaatcaaatagacacaataaaaaatgataaaggggatatcaccaccgatcccacagaaatacaaactaccatcagagaatactacaaacacctctacgcaaataaactagaaaatctagaagaaatggataaattcctcgacacatacaccctcccaagactaagccaggaagaagttgaatctctgaatagaccaataacaggagctgaaattgtggcaataatcaatagcttaccaaccaaaaagagtccaggaccagatggattcacagccgaattctaccagaggtacaaggaggaactggtaccattccttctgaaactattccaatcaatagaaaaagagggaatcctccctaactcattttatgaggccagcatcatcctgataccaaagccgggcagagacacaaccaaaaaagagaattttagaccaatatccttgatgaacattgatgcaaaaatcctcaataaaatactggcaaaccgaatccagcagcacatcaaaaagcttatccaccatgatcaagtgggcttcatccctgggatgcaaggctggttcaatatacacaaatcaataaatgtaatccagcatataaacagaaccaaagacaaaaaccacatgattatctcaatagatgcagaaaaggcctttgacaaaattcaacaacccttcatgctaaaaactctcaataaattaggtattgatgggacgtatctcaaaataataagagctatctatgacaaacccacagccaatatcatactgaatgggcaaaaactggaagcattccctttgaaaactggcacaagacagggatgacctctctcaccactcctactcaacatagtgttggaagttctggccagggcaatcaggcaggagaaggaaataaagggtattcaattaggaaaagaggaagtccaattgtccctgtttgcagatgacatgattgtatatctagaaagccccattgtctcagcccaaaatctccttaagctgataagcaacttcagcaaagtctcaggatacaaaatcaatgtacaaaaatcacaagcattcttatacatcaataacagacaaacagagagccaaatcatgagtgaactcccattcacaattgcttcaaagagaataaaatacctaggaatccaacttacaagggatgtgacggacctcttcaaggagaactacaaaccactgctcaatgaaataaaagaggatacaaacaaatggaagaacattccatgctcatgggtaggaagaatcaatatcgtgaaaatggccatagtgcccaaggtaatttacagattcaatgccatcctcatcaagctaccaatgactttcttcacagaactggaaaaaactacttcaaagttcatacagaaccaaaaaagagcccgcattgccaagtcaatcctaagccaaaagaacaaagctggaggcatcacactacctgacttcaaactatactacaaggctacagtaaccaaaacagcatgggactggtaccaaaacagagatatagatcaatggaacagaacagaacagagccctcagaaataacaccgcgtatctacaactatctaatctttgacaaacctgagaaaaacaagcaatggggaaaggattccctatttaataaatggtgctgggaaaactggctagccatatgtagaaagctgaaactggatcccttccttacaccttatacaaaaatcaattcaagatggactaaagacttaaacgttagacctaaaaccataaaaaccctaggcattaccattcaggacataggcatgggcaaggacttcatgtctaaaacaccaaaagcaatggcaacaaaagccaaaattgacaaatgggatctaattaaactaaagagcttctgcacagcaaaagaaactaccatcagagtgaacaggcaacctacagaatgggagaaaattttcgcaacctactcatctgacaaagggttaatatccagaatctacaatgaactcaaacaaatttacaggaaaaaaacaaataaccccatcaaaaagtgggccaaggacatgaacagacacttctcaaaagaagacatttatgcagccaaaacacacatgaaaaaatgctcaccatcactggccatcagagaaatacaaagcaaaaccacagtgagataccatctcacaccagctagaatggcaatcattaaaaagtcaggaaacaacaggtgctggagaggatgtggagaaataggaacacttttacactgttggtgggactgtaaactagttcaaccattgtggaagtcagtgtggcaattcctcagggatctggaactagaaataccatttgacccagccatccaatcactgggtatatacccaaaggactataaatcatgctactataaagacacatgcacacgtatgtttattgcggcattattcacaatagcaaagacttggaaccaacccaaatgtccaacaatgatagactggattaagaaaatgtggcacatatacaccatggaatactatgcagccataaaaaatgatgagttcatgtcctttgtagggacatggatgaaattggaaatcatcattctcagtaaactatcgcaagaacaaaaaaccaaacaccgcatattctcactcataggtgggaattgaacaatgagaacacatggacacaggaaggggaacatcacactctggggactgttgtggggtggggggaggggggagggatagcactgggagatatacctaatgctagatgacgagttagtgggtgcagggcaccagcatggcacatgtatacatatgtaactaacctgcacattgtgcacatgtaccctaaaacttaaagtataataaataaattaattaattaattaattaaaaaagaagatattttgtcttacacaacttagacatgaactacttgataaacactttcatgggattctcttgaatcttagattcctattgcataatactataaattcagctcccaagtactcaagttaacccatcagtactgtagtatgtatacacacagccataagacagatcctaatttctaattttttttttttttttttttgagacggagtctcgctctgtggcccaggctggagtgcagtggcgcaatctcggctcactgcaagctccgcctcccgggttcacgccattctcctgcctcagcctcccgagtagctgggactacaggcgcccaccatcacgcccggctaatttttttgtatttttagtagagacggggtttcaccgtgttagccaggatggtctcgatctcctgacctcgtgatccgcccgcctcggcctcccaaagtgctgggattacaggcgtgagccaccgcacccgtcctgaaattcttaaaaagtctcaaacaaccgcagagcaacagttttgctttcaaaaatctcaggaactaggtagaaatctttaaaattttaagccgttttcaaaaatcagccaaagaaaacagtaacactgggctctgacagctttactagatgtagaaaccaatttgtgccatttaatgtcggactaccaaatgacatcactcttcccacatggagatcactagtggcactaatggttccacctttttcctgtgagcccagagcagaggcaaagagcagagcactaagcaccataaatccatggagagatactgatcaccaacggcagaaccccacatcagacacacaggccgtgccactcgcttgtcccccaatgcagacttaccaggaggccattccgtaggtcacagtttactcaccctgtttggtaggaattttaatcgtgtttatttaaatctgagagtctctttgtctctctagacgcccacctatgacacaggtgaaaaatcaatcccactcaaaagtagttgggctgtatcctttctgctacctcatttgtttacatttttcaagaaaaatctcaactactatcatcttaaatctttaaaggaaaaattcagttaattgtttcctttttttctttttttgagacagagtcttgctctgtctcccaggctggagtgtagtggcacaatcttggctcactgcaacctccacctcctgggttcaagcgattcttctgcttcagcctcctgagtagctgggattacaggcgtgtgccaccatgcccagctaacttttgtctttttagtaaaattgggtttcaccatactggtcaggctggtctccaactcctgacctcaggtgatccactgcgcctggcccttaactactttttttaaacaactttaagcctttggtttcctctgaagaaaatatttttaacaaaaacactccagaaataacaaaagggctggttctttgaatataaggaataacttttgcctattttccaataaaattgaaatgggaaaggataactggacaagagaaaaattaaagtacaacaatgtgctaacaaatctgaaaatagcaagaatttgtctaggaattaccaaggttaatcacaaaaacttatacatgaccaagtaatttagacctctacaatcaactacctacctaacctaaagtaagtgctatacccaaacagcttcagtacttcgttctttcaagccaaatgctcaagaagaatgacagaagcccagtgaaaagacagacatggaaaaccagaaaggtcaggcagacatattctatgagtaaaaaaaatgtagtaaaaatttaaaacaagagccgggcgcggtggctcatgcctgtaatcccagcactttggcaggctgaggcaggaggatcacgaggtccggagatcgagaccatcctggctaacaccgtgaaaccccgtctctgctaaaaaagaaatacaaaaattagctgggtgtggtggcgggcacctgtagtcccagctactcgggaggctgaggcaggagaatggcatgaacccggaaggtggagcttgcagtgagcagagatcacgccattgcactccagcctgggcgacagagcaagactccgtctcaaaaaaaaaaaaaattaaaacaaggaatggatacaataaataacatcctaatttgcttttttaccttaacttggatatcttttttcactcaaacgtccctactgcattttgacaagagtattccctcaaatagatataccacagttgatttacctcacctacagtgtgtgtgcatagtttccaacttcaatgtttcaataaaatctttgtacataaaatttgtgccctgtttgaatacctctactgcaacacgttcttagaagtagaactgctgagtcaaaagggcctgaacatttaaaattggtaaatattaaattcccatacaaaaaggcccctgctcagtctatggaattctagttattccattccagtaggactccagttaatacatttatgatacctttgaatactgcctttgttttcacataagagtagtggagatgggtaaaaagcatgctgagataaaaattcaggttgaggcaaaaataactttgacaagggtgagtgtatgcagcagccatgtggcaagatcagtttgggtctcctctgtgtgaggtgctgtgcatgacctcatttgtaccccacaacagatccaatttctagaaactaacaacattctcattttagaattgaaaaaactgagccagagaggttaagttatttgcctgaagtcacacaccacctggtggagccacgattcaaacctgggtttctctatctcctaagccagattcataaaccagtatgaagctctcaatgggtatagatatgctttaaaatacagccagagctgccaggcacggtggctcacgcctgtaatcccagcactttgggaaggccgaggtgggcagatcacaaggtcaggagttcgacaccagcctggccaacatagtaaaaccccatctccactgaaaatacaaaaaataagccaggcatggtggcaggcacctgtaatcccagctactcgagaggctgaggcaggagaatggcttgaacctgggaggcggaggctacagtgagcagagatcacaccattgcactccagcccgggtgacagtacaagactctgtctcaaaaaaataaaataaaataatgtataatatttatacaatatatatttatataatatttatattatatatatatttctctagagctgtcaaaaatatacatgaaagctttaaagaaaagtgcccactagaactgtcactcgaggggctgccttcccctctcctctcacaagtcccttgattggccttggtatgacttcctgtgagtcaaaagaaatttcttttgcgtagttggcaaaagcttaaacctatgatcatcaaaatgctaaaaagggcatccagagacagtcagttatttttattttgaaaaataggggtggactgaagattaagaactgaaagcaacaactgaaagcaagcaatgttggccgggctggtcttgaactcctgacctcaggtgatccgcccgccttggcctcccagagtgctggaattactcaggtagttctttatagcggtgtgaaaacagactaatatatactagacatacggtctagaatcatacattgctttttcttgttttttctgagacggagtcttgctcttttgcccaggctggagtgcagtggcacaatctcggctcactgcaactgcaacctccgccttccaagttcaagctattctcctgcctcagcctcccgaatagctggaattacaggtgcacaccaccatgcccggctaatttttgtattttttagtagagatggggttttaccatgttggccaggctggtctcaaatgcctgacctcaagtgatccgcccacctcagcctcccaaagtgttgggattacaggcatgagccactgcgcccggctgctttatttttcataaaagtgaaaggcatgatttatactaagatgatttcttcctttctttaataaatttattgaccataaaatacatgtactaccatgatgatttgggaccatgatgatttggaactgtctgtcaattttaaaagtttgtgctctttgacttagaagttctattacataaattcttagaagtatttgtaccaaggcacagaagtttatgtttaaaaatttgattgcatcattacatgaattagtgaaaaatggaaaactgaactttctgaaaatctttataaagcaccttcagatatagctaaataactgtcaggtgaagataaaggaattgaaacttttaagttgcaaagtatcttaaacgtgcataagatgggtgtgtacagatgagacagagtgagactctgtctcaaaaacaaaaacaaaaaacaaacaaaaaaagaactacccaagaatgggtaatttataaagaaaaggagtttagactcacccctgtaatcctaacactttggaaggccaaggtgggtggatcacctgaggtcaggagttcgagaccaacctgggcaacatggtgaaaccccgtctctactgaaaatacaaaaattagctgggcgtggtggcgtgtgcctgtagtcccagctactcgggaggctgaggcaggagaactgcttgaacctgggaggcagaggttgcagtgagctgagattgtgccactgcactccagcctgggtgacagagcgaaactgtctcagaaaaaaaaaaaaaagaaaaaaaaaaggagtttaattgactcagttggctgggcaggcctcaaaaaacttacaatcgtggcggaagacaaatgggtaacaaggtacgtcttacttggcggcaggagggagagagagagagtaagggatggggcaagtgtcacacctttaaacccttagatttcatgagaactcactatcacaagaacagcaagggggaaatccgcccccatgatccaatcacctcccactgacaagtgggaattacaattcaagatgagatttgggtggggacacagccaaaccatatcaactagtttcctacaaatgaaaatcacttaaactctattgtctcttcctttatatcttcaatccccatcatgtacctcttatttatgtaagagttaacccaaaattcaattcatcatctctaatcacccacccatctctaatcatttgtttcttcagcacctgtataaacagatgtactaaatttgtaccatattgtttacaacttggcaaagttctctggcatactccatgttttctaggataatgtaacacactgcaagtattaatatagctgttagctaaatgaaatctcccttctggctattcagcatttttagaacacatacatcagaagaagacttgccttcctactaaactattatgtggagatttgtgttaggggcctgtcctgcacagcttggccagatcacttctgtttctcttcaccaacaaagaacacaaaataaaattatttcattcttcactatttaagtcagaagaacagcatctctctttggaagatactatataactcacagcccccagtgtgtcacacaattaccatgtgtcatttatccctttatggccttttttattttataactggatagaccaagtgaattaatgccaacactgactatcaactgtgctcaatgttagcattacttcatcattctggtccttgtatcaagaccattaagttaatcttgaccattttaaaaaaaattaagggtgggatctaaatattttatctcactaagaatgtccgtattatgttcttctgaacaatatacttgggggaagctggtggtgataaagaccttttcaatggtcaaactaaacctaatgtgtaactttcccagatttaccccacagtattttgtcatgactgtgtaattatttgtttcctgggctttgttccaaaaagaattttatgctgcttataaaatacacataatctgtaaagataaaacaaaggaggtgaagaaataagagcatagggaactgaacactcaagataagatgaagccaaaaatgctgttatacaaatctggctttaagcttcctcgcagctaattttttaaaaagttagttgcatgatttcccatgactatgagagaaaaactattcatttacttattaaaaaatgactattcctggtactggtttcagagagcaattcctaaatatccccagagaacactaatgtagcagcatcctcctcagagtgaaagcctggcccgaacatgcatgtgtcttagcctggaacacgtccaaggctgctgttgtgagaaacaaaaacaaagttatctttctgacatagtgatgaagggctgtccatgttcttgttttgctgatgagaaataacaaacccaaaatgaagcttaagcataaacttaagagaaatgttgtgtgaagctttggaaaaggaatagtggccagtagataagggtcaaaaggaccaaaatgtaacagaaaaaaagggcacatacatgaagaatcaatgtgtagactttaaaatgtcctatcctggaatgaaaacagaagcaacagaacttgtcaaatagaagcagcagagttagaagcaaactaagtgtttttccacaccaggagatgctgccctagaatgacagacaatgatgtgtgctgttggcaatcatgtcttgaagaaaagttgactcatcagatgtctgaggcttggtgaagacatttctgaacgtcgtccaattccctttgctccaatttcctatccatgaagcatcttcttaaccaaagattacttttcaagaaaattttcctctgggaatgtaaggcagctcacataaatatgctgtcaacttttgccaatcattaaattggctctctggtacacttcattcttatatgggattcagaataagccatgagccgggtgctgtggttcacgcctgtactcccagcactttggaaggctgaggcgggcggatcccttgaggtcaggagttcgagaccagctgggctgatatgatgaaaccccatctctactaaaagtacaaaaattagctgggcacgtgactgtaattccagctactcaggaggctgaggcaggagaatcgctcgaatctgggaggtggaggttacagtgagccaagatcatgacactgcactccagagcctgggcaacagagcgagactctgtctcaaaaaataaaaaagaaaagaaatcgagactaaaataagcctatgctagaacaagcctgtgtcaggatttggacaccccaaataggcagataatttaaatttttacttgcaaaactcagcaggcagagcaaaagttataagcctttttcacctgaatttaagtctatgagacctaggttggaaaaggcccattagcgttacccagtcttgttacacattccttccatttaagttaaggtctagttgcattgtctgaaccttttcttggatacattctttgggactgaaggatgttcacaggacataagctgcttcccaatggatttgtgccagatgcctatcggcaaaacttcctttggacttcttggcagactctcaactacggcttgaaataacagaagaacaaagctgctcaactgaaagtttgcataactggtgaagtctgccaatgagtaattcctaatcatctatcgtgaagacatacaagtatgagcaaacagtaaggttaagtgtatttactttgtgggggacaaaatctaagacatcacaaaggcatggagacatgcatgtcagccaacatgatcagcctccaggtacctggaaggatgccacggtttccctttggcttgtaaaatagatactcctgggtttttttgttgttgtttttaaatggattttggtctggaactgaaactaagtttactcaactccatgacctgaacaaaatattgaagtctttaacattaaaaaaaaaaaaaaaaaaaaaaaggcaaagaaagtttttcaccataactagataaccaaggcttctcagagataataaatgtgcacagtgagttacttacttagaaattgtttaccaacaaaagagttgcacccactgtgagaaatcttaaggaggaagactaagagactccctgaaacactcatctgatttaaaaaattccttccaactcataatttttttttttttggacaaggtctcactctgtcacccaggctggagtgcagtggctcaatcacggatcactgcagccttgacctccctgggctcaggtgatcttcctactttagccttccaagtagctgggataggcaaaggccaccacccccggctaatctaaaaaagtttttttttttttgtagagacagagttctccctatgttgcccagcctgatctcaagcaatcctcttaccttggcctcccaaagtgctgggattacaggcataaaccaccgcgcctggccctttgtttcttaaagagtaccttaagcctaaaaaagtgctaatctctcttgcctctttcataagcagaaagctagccattttaagattacactatcattttggagacttctgagaagactccaaagaggctatcaaaactgaagccagcagcccttgggattacttctgccaatccaactgtatgctgccaagaccatccagctaaggcgacacgcactatgccaattccagctcttgctctgcttcactagctgccaattccttcttccctactgtttgagcatttctgaaaggcgcgtttcctgtcatttataaactcgaagtttgccagttaagtactgtacgagccagctgctaggcaggaactagagactttttgtctgttggaagaaccaactctttggctctggggagactcaacctggcaagttctgggaagaagagaatattgtgggggaactagtaggcaaagttctagaatggaatagaggcaagggatttatccaaagaagagatgcatcatttctactttcatgctacaaagcaggaatgagaaaacatgagtagagaaatgcaacaattctaaaagaaaaaggaagtagtatatattaaaaaaaaaaaattatttgaaacatttagccatcaaaacctacttcttgacaggcaatatacatttaaaataaaagcagaagttcactgttaacctacaagacatcaaggataaacacgatcttagtacgtaatctgtgatagcttcaaaggaacagcaagcttctcatcagcaagtatagataccagaatgcagttcaggaacagtttaaaagtgctgagagcaaaatgcccgtccatctttaactttctaaaccatttttttttttttttaaataacatcatagaccctcacaaacataaaacagtatgttctttttttctcttctttttttttgagacagagtcttgcttagtcacccaggcgggagtgcagtggcacgatctcggctcattgcaacctccacctcctcggctcatcgcaacgcctggttgttatcattgcttctttttggcttcatttttcttgctaaagaataggccggctgcagtggctcacgtctgtaatcccagcactttgggaggccgagatgggtggatcacttgaggtcaggaattcgagaccagcctggcaaacatggtaaaaccctgtctctaataaaaatacaaaaattaaccaggcatggtgctgcgcacttgtaatcccagctactcgggaggctgaggtatgagaatcacttgaacccaggatgcggagtttgcagtgaaccgagattgcgccaccacactccaccctgggtgacagggcaagactctgtctccaaaagaaaaaaaaaaaagaagcaatgataagcaaagaaactggtaaagctttgggaaatttactgcctttaaaaacaatagtttatttgtatttcaaaaagtggtgaccactaggtacacaaaatagttaagtattagtgatttcggtttagaaaaagaacaaagtctaaaaatagtgaaggcaaagctattccaactgagtacttgcaaccaccccccaccccctgcaacttgaagttatatactcaaacaacacttgttaaagaattgttcccctgaacattaagccagaaaattgcctagcagctgtttgaaagtagaatttactctaattgtatccagggacaatatgattttctgaataatggtgttttctctttatttagatgaaaataaccacaggaatgggaatctggaatatggaattttctcctccagaatttagattctgctttttgagagaacttaaaagcttgcttcctctcttccaggctctgggaggctcctttaacaggcaatagtgccaaatccagtgaagcagacaaatagctgtccccaacatgtattttcctttagtaacagatcctgtgtttaatgggcacattgctgccctcacacagggattgtctcccagcttctcttgcagctagacacagccagtggtatgttctggccaacatgaggcaaacagaagtatgaaaagctatcctcaggcagtgtccttaaataaggatgctgccaattttgatcctttatccttttttcagtttgaaatgaggtctcaccacattgcccaggctggactgaaattcctgggctcaagcaatcctcccacctccgcctccccagtagctgggactacaggtgtctgtcaccacatccagcaatcctttatccttcttgttggctggaaacagacccaatagttggagcttgagcagttatcctgggccagggaatggcacacaaggcagatagaagcaccagtcctgaaggatatggtggaaccacttccagccttggattgtctacccttgaactcttctcatgaaaaaggaaaacgaatttaagccatttttttttctagtaacaatacatacccaaacctaatcctgatacatgtagtatgccaaaatagagttagaagggtaaaaacagacataacggcaacatcccacagaggtttttggcatgatatttcctacgagttgggatggcaggtggtccagagagaaagaggtgagttttttttcactcttcaaagcatagaacaaggtagaaaaagggatatacacaactagtatgtatttgtgcttatcctgaactttttctcccttgcaattggtactgatagaaactgttcttttcaacattgaagcgcccctccaaagactagtaaacattctttgtagaacagaagttcttagctgggcgtgatggtgtgtgcctgtagtcccagctacttgggagtcagaggtgggaggatcacttgcacccaggagttcaattccagcctgggcaacatagtgagtccccatctcttgaaaagaacagttcctgacaataaacgggtagcataaaactcctgatgacctttatgaaactacacatttttgagcttccacctgctcccactgagatttttatttatttaagtgggacacaagttcttaactaatcaaacagttgttgttagccttggctacacattggagtcatctcgggagctttcaaaattgatacctttgcctcacccctacccccagggattttcattcaaattgtctgggataattataatttaagtatgggaaaaacatttttttccccttaaggcagggaataattaatgctgaactttacagattgtcaatcaatgtaaaataagaaataaaaacagtaatatatgatttagggaaatatatgatttggataaatgatttaggaaaatattcagttataaagttgagaactccattgtatcactgcctggaacacatgtagaataaaatatccactggaattctgcaaagaacacagattgttaagactgtccatgttgttgtattcctttaagaatgcgaatttcctttgcctgtccttgaaaccaccagactgttacatctttgcagctcttgccctgtggcagtgtttttactgttggcagcttctgcaacttctgttctcatttgctccttctaattgcacctatttgatttagcttaaatgacaggagaagcaagatgacctattccagtgacatcttccttacatttactcttggctcaacttttatttaagtaaacatcaccgacctcctcctcccattcttaaaacaaaactgccactgatttaagtcattcagacatttaagactgtagaagtgctggagaaatataagttcttaatatgatctcacttctctcaaagcattcttaatttttctaacataggaacctgatacacagaactataccataagtcagaaaaatgactaaatccagagaatatgcagtcttatctacatattttaaaaatagttacctacaagttcactctaggaattttggctactgaagcatccatgtaagtgtaaaagactgatgtccaagaatgttctattctgtgatcacttgtaatgtgaaaagctttgttgattggaacatgtcaccagtatagagagaaaaaaagagttaaagggacacctcagtttacaaactgggaatgaaacagagaggttaagcaacccacccagagagaaagctaatttaggggaaccagcagaaatgtgggttagatgcgagctttcctagcacagagttacgtcacatgatcagctcattgtaccttttagtaagtgtcattttatacagaagtgttggggacacacctgccctaaaccaatcctatgacacacacataaactagtggacatgttcaaagttaagtccctagatgtactctcagattcctattttaggctcattctcccctattcctccttaaacctttcatattatttaattctgtagaaactagaaatgtgtgaccttaaaggctttagacacaattcttatagttcaggttttttttattatacaggtgagaaaacaaatccagagccaaggagtctgaccttcagtgacacaaaattgtgtcagaggcagtgggccagacctgggctctgactccagggttctttctaccagtcccctttagcatcaaagtaaaaacatgccagccacttcagggggcacgtaatgaatctatgcacacttcacttgtagctgaaattttgatggctatcattctgttacatgatttccaggccaaaacatactagaaacggcaggtgaattgcaggggagacaagatgctgctgacagtaaaggcagaaacacacacggcaggagggcaactgcttagaaccccaatcagtttggtgggttcaaggacaggaaaaggaaattttcatttttaaaaggataaaagggggacaatctgagccatctgtattttctgtacaatttcaatgtcattttactctacatatttattctaggtagtaatacagtggaatcaccaacctattccacctggacatttccccaaattggtgtaagaggtatcactcaaaatattaatattaagtaagtgagccaaacaaaaagggagagatgtcaaaacaaattcatgaaggaagatcctagaatgtcacatgaatacctccgattatcgataatgcaactgaattattaactactttcaaaataatttattccatcaggtgtctgctgtgctgcgattattttcataccatcactagtctcctatttctgacctcaaggaaactgctattcttaaaaagcaagtataaaatatttctttctttttctttttcttttttttttttttttcccagacagagtttcgctctgtcgcccaggctggagtgcaatggcgcaatctcagctcactaccacctctgcctcctgggttcaagcgattctcctgcctcagcctcccaagtagctgggattacaggcacctgccaccactccggctaattttttgtatttttagtagagatggggtttcaccatgttggccaggctggtcttgaactcctgacctcgggtgatcctcccgcctcggcctcccaaagtgctgggattacaggtgtgagccatggcacttggcctaagatttatttcttatataacctacctctttacaaaataaacatctgcttaatgtatgcacgcacacacacaatataattgtgcacaaaactatcttatctctttggtttaaaaaagtacactcaacatggaaaacacacagagtcactcctgacctttcaaagccattgacttcaggtgacaaagatgaaagaagcctttaaaaaatcttttcctttagtatttaataattactggccaggtaatagctcacgcctataaccccagcactttgagaggccgaggcaggcagaccactggaggccaggagtttgagatcagcctgaacaacatggcgaaaccctgtctctactaaaaatacaaaaaaagtagccgggtgtggtgtggcacacacctgtaatcccagttactcaggaggctgaggcatgagaatcatttgaacccgggaggtgaaggttgcagtgagtcaagattgtgccactgcattccagcctgggcgaaagagtgggactgtgtctccaaaaacttttaaataaccaccatggcacatgtatacctatgtaacaaacctgcacattctgcacatgtatccgagaacttagaataaaaaaaaaagaaaaaagaaaaaagaaaaaaaatttttttaaataagaaaaacaattactaagtttcttcccctgccacctcaaagtcccaaacttttgttgtgatatttgaaaacacatgttgacaaccccgctatccaaaaactgcaaaataatcccatgtctactccacaaagggccaaataagaaggctccattagcaagaactggagagcatatgttggcatctaaacagatgatcacgcggggactaggtttacattaagattttgcccaatcacaaagaaagccaaggccagttatcttacctcaaactgcgggtagggaggagtcatggctgaagggggccctgaggtgggaggtggcatccctgaagtgggtgggaacagacccaaggcgttcagatttaatccaggaattaaatgtgcttgaagctgcaacagtaaaaaggccccttaatttgacaattaaaagaatcaagggaaagtgagcatttttaagtgacagtattcaaactgatctcttgtctaataaagaaatgattgtataactcaaagcagatgttccatgggactctacttgagtacatcgtttacatctgtttatatcccttggtattttaaaatctgtgtgctggtttgccccctccttggtccacagctgcattaagatatctcaagggaagctttcctttcccttatgactagcccacaggacttagacaaaaccgtattctgcatgctgtgggcaaactaaatatagacaaaaagcaatgtatcagagttgaagaggtaatcaagtaagattggttcattgaaaagcaaaccagctattaagagatctttacttgctgggtaaaacttagcaaccatgggtctagaggcctcaaagttgagccctctggaaatcaggacccatccccatgtaactactgcaagtaaacatatcactggaatggaaataggagccagaaagggtattttaatttgtttaattttataagggttgaggacgtaatgtagacggtggaagggagatttgagtgtacttgaaaatctttttaaaaggcctaagggggttagatttaatcccagttgattccagaacatttggagccaagcagtgagaattgaagcaggttggcaagaagtcacgtggggtgtaaaatggctagcattctaggctcttctcacaaacgcagtatttgcacatttccctcgtctcaggttttgtgtttcagatgactggcccaattgaaaaaaaattattttttaaagtcatttactttaaaatttaagacaggcttttgaagtattccattttcagcaccatttcactgattaaggaatgtcagcaatttgctttaatagcctcagatgcactacacagattgttttatcaattgaaattcttgtatctccaaggtttatatggctaaccaagttttaaacctgtaatcttaacattaacttttatatgcattatatctattgtaatcctaataagaatgcaaggtaggcagtagtcccattttacagatgagtaaactgagcctcagagagactgagtaaatcatataagagaagagagctgcagctcataaatggttcagctgtgattcaaatccagttcatgtaacatttcttctatattaaactctctcaaattaacattgtaagagaggtactatattaacctttgtaggtagacactagccttacttcagacagaaggaagctaaggctcaaagactgaataatttgctaaagtcacagagacagcaaagcttaatgtcaaagccagtatcttccctactatcccagggtacttgctgaggtgctaaaaatcaactagaactacttctagtgataatgccacaaaagaattcaatattaatgcagttaaaaacattgttttaactatttgttaaaataaagacatgcccttcataacaaaactaacattcatagaagcaatatcattttcataagactccctgattttcttcatgatctcctcctcagctttggcacatgtctcaacattgcctttaactgtaatagtgcgttctggattatacagcgtcaattcctgcaatctgcagaatgaaaaagaagggaaagaaaaagaatgaaaattggaggaagacagctaataattcagccacagacggcaattaaaaacaaactgtggagcctggtaatatgtaaaagtgggtggtaaaacatgatgggaaatgagtaagccccaaaagacgtaaatccgaaactgtaaagctgcaagagagaagaaaatatttgccctcccattttctcaactaacgattactggatacatatagttcaatcaagtccatattttaaataaagcttacttctcaaccgcttaaagttgaaccattttcacaattgaacagtgaattaaaaaatgactggaaagatgtatagtttttgaggaaaccaaataccctaagtacataacctttcataagtatgttcctagtctgtattaaccaattctaggcataattggcattctcgtgcaattgcattttctgggtcaccaagcaaggagaaagcatggaaatattccaaaaacacaagccagaattcctgtgtctaaacttagtttttaccagtttctttagaatttagattgaagtaggctggaggaatatcaatccatcttgactaaaatttaaaatggttcaccgatgccatttagataacaaaaacgttagatagtggcagaaatattcagaaactccctgcgggacctaggtcctgctgaaccttcaaaagccactgaatatcatacctgaaaacacctaagcctatgctggtcaacagccttgagaggaaaagcaatgggagacatgtgccatggaaaacagaactaagtacataaattgagaggatatggattattggtacaaatctccttcatcttcctgaagttctcattttcactactagtataatgtcacaggctaaccttgagccagatgaatgggaagttattccttaacattttcctcaaacttgttaaaaatgtaaacatttgtataatgaagactatttctcttagactactttaaaaagaagtctataattctaattcagtctcaacctggccctgccaagcattttgtattacagttttaaaaatagctgcttctagaataacttttgagatttttttcttttaaaactctcccctttctgggggtaaatttaagacaaagtagtattacttattgaatttaccactttgtggggtttttttccccctttctttacaaccaaacagaagtttcctgcttccttactacctcctttgaaaactccttgtacacaaacaccgtgcagtctttcccctaccactcttcctcagttcatcaatcttttcccacctttttgagtactctgagtgaaactaagaatggccaccctcagaaaaacctttccacgtaatttcagagcatccacagattctaagtgtggtagcctgcctccaaggtgattcctgtcacccagttatctgtagtcccacacatacataccaaatagggctgacttgtgtaaacaacattagaaaaatgatagagtataacttctgaggctatgtcataaaagacattgcagtttccatcttgacagctgccatgtcttgagaacactcaagcagctctgtggagaagcccatgtgggaggaactgaggccttctgccaacagccagcatcaacttgtcagcagcattgtgagaccccaagccagaaccacccagctaagctgctcctgcattcctaacccacaaaaactagctgagcaattaatgttcacattgtgttaagctgtcaaatgttgggataatgcgttacacgacaatggataataaactgggttatatattccaactttgggaataaatgtcataaaacatagttaagactgctttagaaaacatgaatgtaaagcatttggttcctcctgccagaagcagataatgctttcaatacgggtcagaaacctaacaggcagcaagctgtatttgagaaaccatgtgtaagtacggcagcacaggctagctgaagcagctgtaaagtgggaagctaagcccaatacacaacatgcagcttacagtgttggaaagttttcttattcaaaagcaaaggagcactcacggagatatcgtgattttagtgtctgtgtcttgctcaatttttttaagatttcttccttctttaccaataagacgtccaacaaagttattatgagctaaaatcttcaaggggatctcttctgtgctgtaaatagaaaagtggccataaaattagaataagtaaacctattcgtgggtaaaaagacaatattcactcattaaacatttacttcctacctaccatctgggaagcactgtgttaggtacagcttaaaacttgctgacaattggccagcattctagcaatgcatgaatagaaggggagaaaaaatacagaagttaacttctaaaatagttcttattttattcacttcaggaaatatcttcagtgatggagtctcttactcaaaaccatattcctaaacccctactaccagaacacaacgtacaaataaaaaacagtaccatccagtacaaatatacacctggagatatgtgcataatttatagaaggaaacagaagaaacaacagtggttacactttgggggaagggcataagaacaggaaggggagctttcacttttcattttgtagctttctgaatttcccagtcatatatatataaaactgtttaaaatgtcattgtggttaatagatggtgggcttttcctttttctttctttttttttttttgagacagagtctccctctggcgccaggcaggcgtgcagtggcgcgatctcggctcactgcaacctccgcctcccgggttcaagccattctcctgcctcagcctcccaagtggctgggactacaggcacatgccaccacgctcatctaattcttgtattttcagtagagacggggtttcaccatgttggccaggatggtcttgatctcttgacctcatgatccacccgcctcggcctcccaaagtgctgggattacaggcatgagtcgccacaccaggcctatttttctctatactaaaataattcttctttaaaatttttactttaataattacattcttatgatatggcacccacatataatattactaaaacatatttaaagttctctacaaattaaggttggtaatgaggtccccacactaactccagtgccttactctcgattctactttcagtgcagcgctgttctgtacgctaaacgtggcacagaacccaaccttcactcaaagttcctgtggaagaaatagagttcccgcctgcattacccagataaatctccagtttgccttagaagagacttaggcacttccccacctccacactccctgctgctccaaggtggggccaggcagtggacaagaacagagctccaatgagctccgagtaaaggatgagtcaagatttggggctcctgttttgggttaatccaggatacctcctggtcctaggttccccaagttgccttcttctatagctgcatttctcttccccgttatcaccactcgcctatgttcaaatgtgaatgaaaatatttaaatattaaaagacatacacttcacaaccagatcaacagtgccaaccactgtagctcatcaggatatcatttccctctgtttgttggcaattcccaagaattgtgtcagagatgtcaaaaatacaagagcacaaatatcaacctctttcacaggacaatcttctttactcacaattttatatcttgagcttccttatgcataatctccagaatagacttacaagccgcagaggtgccttcaggagtagagaggatagtaatcgacttctcagcagcccccgcattttctttacggtggacatcgattctgatagtgggcgcaagcagagaggaaaacgagagcagtaagcgtgtattcacagtggagtctgtaattaccaaatgcaaagtcatagggcttcagggcaaagcagatgactcacttccctcaagagcataaactttcaataagctgtcaacattaatgccttaagaggcaaattttaattctaggaacattcccctttctctttcctcaatccaaccaagcggggacatcttttcattctacccaagctgtttgtgcttacagcttcctttcagatgccacagaacaaatgtctcatgacaaagagcctggattcaatctgctctaaaacaaataggaactggagggcatgccaagagaggagttggaatcccataagccaagttgaactgcttattctgcacagtatatcattcttcattcattggatgagcagatttcaccaatctgcttcccctttgcaaggttcttcccacattttgcctccttgatagaggaaagtctgcaacgaacagtgataggaatggaacctggacagatggcaattctacttcaagaaaagcaagtggccaataaactcaaaatgatgtttaatttcactagtaattatatgtctgccagctaaaagaatgtcattttcttctagacttgcaaaaattgagatagaaaaaattaaatatgggcaagatgatgggtaacaaggcacactcaacacttttggtaggagcaaactggtcagcaaaatgctgagcaccttgtgactcaagaactgtatttcttgtaacatctactcctggtaacatctacagatatagtctcatacatgggtcaagagtgatgtttcttacccttggcactactgactttttgggccagattctttgttgtggatggggtgtcttgtgcattgtaggaaatttactaacttccctggcctgtacctactagatgctagtagcatgcctctctctcaactctaacagctaaaaatgtctccagacattgccaaatgtctacgggggttggggcagagagatgatcatttgtagttgagaaccactggcatgggaaagttccgtttctaacagatagaaaattagaattatctaattgcgggaagagatggttaaataacagtatattcatatcatacagatgtttttgaaaatgtggtaaaattacaagtaccaacacagtaaaaagtccttaagtgaaataatgcaattcacatcatgacatgatttcttttttaaagtcacacatgttagtagatacaggcaacaaatcctatagagatacatccccaacttaccaacagctacccaggtgagacgaatggtaactttttaatttacatatttatatgttttgaattaaatataaaataagcctgccattttttaataagtacaagaaagaaaattagctactcaaaaatatgtgtttttgggaaaattaagtatttgttgagttcctttggccattcaaacacttaaagggctaaataactcatggccatgagagtgaccacttgatcatgccaataaaatcaagatttggctttcattttcctaaatgtttggttgaaatctgaagatttacctcaagagtaaaagataaaactaaaaataagggcatgaaacaaattaagggctacctaaaaataactaataaaaaaatagtgtcttagataacagtcccaatcttaggagtcatcttcccggctgctgtttcaatccccagtcactttcagggatgcctgtcttccagcaacacattagcatccctctttgcagtttattttcaccctttcactgtgctaaggattactaagctccgatcccctgagagaaaggaatgtggctttggagattagaatggccctctgagaccattccagaaacgaggttctgataatgactaatttcaatgtcaagagttaattaaatccactggcagagctctgcaaatgaatcatcggatataacaaaaattgcttcccttcccctatccccatcttcctgccttaagtaaaacaaacagttcaatttaagtcacagctctttcatctgacagggaaatgagtagctcgaaaaggaacaattctaatctgctacatgagaaggaagggaagccatataatgaatttctgcaggtaacggtggatcaagggaagcaagaagcccttaaattttaagattaaagccaggccgactgactaggttatggtccagttgtctttcccactcctacatgatgaggtcagggcgattaattttgcattcaggtaaccagcacccaacatctcctgcttcaaagcaggggaaggcaggatcagatgccactgcagggagcaggtgggtatggaccaccactcagtacagttctttttggttctacatgagaaatgggtcagctagtccaatgcaggcatggtgcctatgatgaacatgcatgtcctcttaggcctgctggaacaaacacataaagtatacacagcagtgcagttctaacttttagagaaagattaagcttatttcgttggatcacactgaaaaaaaagaattctcctttctaaatttaaaaggaaaaataatcttgccacttctgtagctggctcaaggcttgcacaatggtatttttggatacaacctcttcttcccagcacactcacaggttcttcaggaaatacagtagtaacaggatgtgcctcgtagcacgttacggagctaggtatggggggaagagtttgtcaccaagcttctttgggtcaaaaaatatccacatactgtacaacagtatggtttctaaagcaaaacaacatataatgcatgagaactgagaagtatcttagatacacatgaaaggcttcaaacataattcacatacagtcattttagtcatttgacaaataaaagatccttctatgtagcagggccctggccttggccctggggctacagtagtgaataaaacaaatagttcccgctttctgctcctgataattagctccaacatttgaatgggaatattccaatcccttaaatcccaccaattaaaaccatcaaaaaatatccagaagaaaaagccattctaattacatggcttaatcagaggaaaaattcggacaaataagatgagcgattctttattcgagtaaggcaagactgaaaaaccacctctgtattgaggccacaaataaaatggattggacccagaaaattacttccaaaaacaatgagggcaggtggggggtaaggggtgggacagaggacaacctggaagctgcctttctgtcttccagagcttccccaaccagaagaggattaggtatcatttgttttccattcatgtgtgaaaatctgacgttccctttgagaatgaggattagctccagatttatatgaaatgaacaccaagatactgcaagatttttacacattcccaagtactgtacaaggagtcctcatggctgtgttcagaagggcaccaagtaccagaacgacacactgttactaagattccaaggggaattctcatgaacacccaccacacactcagcatactcacttagactgggtctgtttggtgatgttccgaatggtggcaccttcttttcctatgatggctccaacaaattgggtgggaaccagcaggcgcagaggcaaatcacatggtttctgcttggatacggatcctggagacccctgccttgaggagcccctctgcccaagcccccggcgacctcggggctgctgcaaggggttttgctgggcggccatttcatcagggatataggctactttcaaggtgaaattctctaactgaaatccattcagtttgtctagtgctctgaaagttgaaaaggggcaggggtgggaaaaggaatcaggctatatgacacatcttttagcaaagcaacacccatctcttctactcagcattactagctctaaacttctgagtgaagccccagcacaagcagcaaacccgcaacacacataatcctcccctctcccaccccgcaccaccaccacccacacacattttcctttgagacaggcacagtggggaaaaagaccacaagtttccaaagggaacctatgtgccatctcctaatgaaaaatagaaaaacaaaaaacattttgtcaaactcttggttaagtttaacccataaggttactaacggtttaggaatagctaagcagcaagagagaagcaagtgggcttcttgccttggctaatgtttccaaaccacagtggaagagacatcagaaatatatacttccttcacttcagcctctaaaatatgaagtatttaaaaccattttaagaaccagtggacaaatatctctaaaccatttacaagagactattctgagtattaaattctaccaatcacactcagtacctattatgagccagtccctgactttgtggtttacgatctgatttggagcaaagaggcaggggtggtgataaaccaaaaaaaagagtgtgcccattctaccacactatttgggggagagtttctctctttttcatttttttttttttttttttttttttttggagacagagtcttgctctgttacccaggctggagcgcaatagagccatcttggctcactgcaacctctgcctccggggttcaagagattcttgtgcctcagcctcccaagtaactgggattataggcatgcaccatcatgcttggctaatttttgtatttttagtagagatggggtttcaccatgttggccaggctggttttcaactcctgacctcaagtgatctgctgcattggcctcccaaagtgctgggattacaggcatgagctactgtacccagcctctttttcattcttgatctttattttaacatgcaaggaaaagtgcccaaatcttgagcataaatttcagtgaattttcacaaggtgaacacacacatccagatccagaactagaacacaccagggccccggaagccccaacagtacctgcttccggtagtcactgcccccctaccccttgcagacttctaataccatagattaattctgcctatttaaaaattttatgtaaatatatatgagtatacatgatatgtattttctcatatctggaaacttttaatttattgtaatattcatccaaattgttgtgttctgttttctggggttttttgtttgtttgttttgctttgttttgtattcattttgtgtgtgtgtgttatgttttcagaagggaaaataataaactagtagagacgaaatagcccagatttcataaacatacacctaacaatacatccctttttaactccccagtgcacaacaaaatgaaaaacaaaaagaaagaagtccccacacttcccagtgtcactcaggttctttgctcagattctgttccaatggccctgagttcaccccaggtgggaaagaaaaacaggcataaaatggtctctttctagttgcttggtgtggtcatttccggcttatacactgctttatttgcaaatctactctcaattcttaaatagaaaaaagggggtggagtgggtgacagttctagtaccaaaaaggtcactgagggctaggacctggaaggcagacctgggcaagcagacagagggctcgctgacattctccggcccagaatgattctcggtttctcacttcagtcttctatcactgtcctaccttctctggcacatgaatgaactcttattgtaaaagatcagtcatgcagaaagtagcaagaggttgctctggcaccgtcaccaaccctccaaggcccttcccagaactgctgctcactgcagtacttctacaaatggaccagtcctttctatatgtttacaaacacatgtattcatattcggttccttcattaaaagcataattggggttgtgatgtacactgctctgtggcttgtttttaaatacaatgtcttgcgatatttccatgtgatttctatgtcagagggcattcttttcataagcttcagaggatgatagctgacacatgccacacttattttgccaatgccttgatgacagaacgttaagttaacgctgtactttcctcctgtcccctttttttcttaagggaatgtggattaagggacctaaaatattttggttatttctaaaggaagacgacagctgatatattttaatatttatggtgtatatttgttataaaaagttggagatgcagaagagtcaaccaactacagattctttcaaaacagctttatttatttattttttttgaaatggactttcgttcttgttgcccaggctggagcacagtggtgcgatcttggctcactgcaacctccacctcctggtttcaagcaattctcctgcctcggcctcctgagtagctgggattacaggcgcacgccaccaccctcagctaatttttgtatttttagtagagatgggttttgctatgttggccaggctggtcttgaactcttgacctcaggtgatccacccacctcggcctcccaaagtgctgggattacaggagtgagccaccacacctgaccttaaatgtttttaaagtcgggaataaacagatcactgaaggttctttcaaaaaatcaggaaacttgaacccactgaaggcatcaattacatctaggcataaaaggtaatctaggctttttcattataaatggcgtattgccagcttcagaagagagtaagtatattttgactagtaaattaagtcattaatgttacaaaaatggtagataactctcttcttgagtgagatagacacatacagatatcattctccctggggtaaaaggtacacacgtcagttaccagatgcttctatattctagaaccatctaaatagtcacatgtatcacaagaaacaactttataacttggcaaaaactaacttctaacttttattgtgctgctttaaaaagatttttctttgtggggaaaagaaaagattctctcactgaagaggtcaggtggcccggggctctagtccccagtgtaccttctgggccccaatggctccaaactcaggctgttccaggcagaatgcagacagccactactgtgtgtacctgactgtctaattgccatctaagcagagttcctaacccctcaaaccacagtgctccatccacagtcagacacagctgaaaaggtacaggaggaacctaacatgcagaatggcggctttctcatgattgcagctcctaaattactgaatttaagtcaactactagaatctttctaggcacaaagtttgttattcatctatgtcatatggtgatctgctgagttcacgaggaaaaaaaattttagtattttcaccaaacccaccgtagatgcaagacatgagatgaacgactgtcataattatttgacacatatgtattcagttaaacagaacttaaagatgtttatccaacatgtatattactcaggagcctggttttgtctttttatttttattttttttttttttgagacagagtctcacttttttgcccaggctggagcgcaatgacgcgatctcggctcactgctgcaacctccacctccttggtttgagcaattctccttcctcctcccaagtagctgggattacaggcgtgtaccaccacacccagctaattttgtatttttttttcttttaactagagacggggtttcaccatgttggtcaggctggtctcgaactcctgacctcaagtgatctacctgcctcagcctcccaaagtgcttggattacaagtgtgagccacagcgccagaccaggatcctgtcatcattacttaactctttgctcttggtgctattttaagggtcgctgagaagatgatgagtaattttgccagttggtagaatttaaatgtattgataagaagtttactggggccaggtgcagtggctcatgcctgtaatcccaacacttcgggagaccaagatgggtggatcacttgaggtcaggagttcaagaccagcttggacaatatgacaaaactctgtctctactaaaagtacaaaaattagccaggcatggtggcgtgagcctataattccagctacttggaaggctgaggcatgagaattgcttgaatctgggaggcggaggttgcagtgagccaagattgccccactgcaccccagcctaggtgatgaaatgagactttgtctccaaaaaaaaaaaaaaaaattgttcattggggtagatcacaatttagagctgaatgggcctcaatagagacaataaatagttcaacttgaggaagagggggaaagagaaagaaaaaaggagaagaaatgagacccagacaagttaaacgtacccaggagtccacacatacagatctgaatagtggaaaaagaatacggactagagaccagaattctagtccagcttgaacattaaataaccacgttatcctccaaaggtcattttcctttttggcattagccatctccctataaaactaaaagattagattcatggtccctttcagctctaaaatttcatgcctggctgggtgcaggagctcacacctctaattctagcactctgggaggccaaggagggaggatcacttgagccccgcagtttgagatcagcctcggcaacacagtgagaccctgcctctacaaaaaaaaaaaaattagctgggtgtagtggcacatgcctgtagtcccagctacttgggaggctgaggtgggaggactggttgagcccaggaggttgaggctacattaagccatgattgtgccactgcactcccaagtctgcctgggcaacagaatgagaacctgtctcaaaaaataatactaaaataaataaaattccatgtctaaaaatctcttcttttttattcccagatatcaccctgtatataatacagggtcctcacaaaatgaggtttaacccattattgaaaagtcataaattcaattatctccttgtatcaagaataagaggttgacaatttggcaatcattattgaaagcctgggtaatatgattttaaggatgtaccgtaatgcaataaatatggatgaagcccaaatgtaaggcttcatgactaaattggttctaaaaacaaaacaaaacaaaacggtatgggcaaataccctagatgacacacaacagaagacgggataggaaactgtggtgaggatccaacactatgcagagattagaatcagtataaatacactgaatgaaaaacccacaaaactctgcagaatgatctttgtaattctgaaagttataatgcatgggacaaagtctacaaaactctatggcaaatttaacagtggttatccctgaatggcaaaaaatccctttgtctcactgctttatttctttttccaaaataaatcttttatttacataattgttaaagtttaaatgggaattttcttacctttagccactggccaagttgcttcaaacacttctaaacataaccatatttaccttatacagatcttcacaatgatacaaaggaactgcaatgatagtttctttcttttttttttttttgagacggagttttgctcttgttgcccaggctggagtgcaatggcgcaatcttggctcactgcaacctccacctcccaggttcaagcaattctcctgcctcagaatgattgaagtttcaaagtatgaataaacattcctattccctaacaaaaataaacatcaggataaccccaaacaaaagaaagtataagaactcaatgtctacacattttctagggggttatttctttgtcacacatgacaaatcctctcatgagtaatgtctgtccttgactggcttatctcaacatctctggaagagggaaggaaataggtgagcctctctcgctctgaggaacaagaaaaggtgcattcactaaacacatacttccatttttaatgaaactaatgaaatgaaatttaaacttgtcaaatttttattttaataattcaagacttaagcctaaaatgaacacatgtattaatattttctaaaatatgtgtactattaacctttgatttattttagccacaaggtggcaggaatttccacgttaagttctgtcttaaagatacagccgtatttgaggactcttcttaagtgacattcatagagctttaactaacagaggcagctacaaccacgttaaaactagctgcctggctcctcagcatcagtgaccagccatcactggaaatgaagtataccaaacaataacaggggagcagaagcagcaatcaaacatgttggaaaaatacataatagctgctaacttttgagctctaccttacaggtattatgaaacatgttttggaggcattatcttagtttttctcagtagcctcattagctaaagactacagttattcccattttagaaatggggctgaaccataacagattaacttgaccaaagtcagctagaaaagtggtggcacacagtctgttccatgcaactgggctctggaattgaactcttaacctccaagctcactcatactttcacaagtacatcaaggtcacatagccttccaaacaacagatgttacaaagagaaaactgagaattaccagcatagccctttcacctaaagattgagctttgggtggctaccgagaaacatggagaaatgacaccaggttggtttaggcagcaggctgtcatgtttggaacccatggagcaggcctatggggttcattggaagtccaggctcaagccacttcaaactgctccaagcagcccagaaccagtgggttaaactataaatacatgcatatatgcacaaatatttgtttctctttaatcttcactttgtagctgagaaaaccaaagctcagaagtcaaggttactaagtcagggctacctgactttggtgtttacgctttctctgctacacccaatgcctctcaaataaaattaattctcctcacagaatgaaaacatattccatatcccttttaaaagcttattagaaaactgataatttttttaccactgtaacacaaaactgagttttccactccttagattaacttttaaaaatacctcattgctttctaattttctcaatctttgaattcttgcagagggagtgagaacaatactcttataaggccgcttgacagggaggaactaaaattaggtagtccctctccaaatattcttattggcaacttttggtcagtatttagtatttaataaatgttaactgactgaatattagaacaaaggacatgaagactacttccctaatcaaaatgcctaatttatttaagttacctaattactaaattatacaattcttaacagccttttccttcctccttgggatcaacagaagcctaccaatctcttaacaactacgctaaagaattttgagaacaccagtgtgtctacattcagtttgctgtcgtggttaggattcttttcagcaataattctgccttgactagccagtctacctttcctgtgcttgcagtcttaatgctttgtttttttgtttttaaaggaggaaggctaaaatgtcaattactttatccctaccaaagttcatcttatgcctcttcaaatctacatagcttatgtctccaacttatgttctcccattcaactaattaactattaaataagcattttgtttccctttagctaatttaagttttcaaataaggccacaacaacaggtctctgacaatctccaaatatccttgggtttatcacatcatcctatattttccaacagggacttggctctaccaagtattcagtataaatctttgtaaagtaaaacatggccgggtgcagcggctcatgcctgtaatcccagcattttgggaggctgagatgggcagatcgcttgagcccacgagttcaagaccagcctgggcaacatggtgaaaccccatgtctacaaaaaaaatacaaaaaaaaagactgccagtctcataacccagcctcaaaataaataaaaattaaaacaatatggagcctctgctttctccctgccctcacttttatccccagttctactgagggtataaaaggtaaaattttcctggtcttcttacatgatacaactaaagaacaaaattagtcaaaaaaagaagagaaagaaaaataaatttgttttatgactcataccacaatttctataatgtccgagaccttatataaattgccaaaaaattttacatgaacaaaggataccaacagaagaaatacagaatgtgtttaaacatattaaaagcctccagtctcacttatgggagaagtgaaaaacacaagatatcactttcacatactagattggcaaagtttgataaagtcctgtgttagggagaattggagaaagactcccccacaatgctgatggaaatttaaactagctccagctctacaacacaatttaaagtgcagttctacttctgggaatttatcatgtggatacatgcttacatacacacgacatgcaaaaacagattcactacaatattgttcataactgcaagagactggaaacaacctaaatatccaaactgcgattaatcaaagtcatgccatatctgtacaatcaaatactatgtaactataaaaaatatatttatatacacaaaacattcaaatgttatggtatcatttgtgtaaaaggaggaatacatacatgtagcatttgttttccacatggttatctcccaagagataaggtagttagggaataatactgggaggaagatttgtactatgtgcatcttcaaatcttttatattttgaaccatgtgagtgttattgattttacaaataaagttccatttaccttatacacatttccatcttcttctcagtcttttctttcatagtccctcctgagtgagtactgcctatagtaacctagctgagctcctactcttgcagctcgttttacttttccccttcagggctcagagtcagccagtgtggtcttttctttcacctttctgacacagaggacagtcagcctgctcctgccagtatggtatctggaggtaggtagttcaggcttccatagttagctaacacccagtgctgtgctactgagcactttgtatgccattctttcatgttcatattctgggcagatctgttaaaggccatatttgtgggacccccatttctctctctagtgctcagtttattagatcttttccagcctatagaattatcttttcctaggggagactgtttgatctgtcaagtattgcctgtttactgcactggaatatatttttttccataaatctaagagcaaattacattaatccaatgtctgcacgctcctaaatgacaatggtaatcaggtaaccagtgagtaagaagacttatcatttaacactgttgtttaacacatgatccaacttaccagcttcagataaaatagccataatatatgtgtcatacaagagggggagacggggagagactttatgttatttggcaacaataccaaggcccagagcttctgcaaatagggtgtgattcagtttcatactagaccactctattattggcattaaagatatattgaaaatgtaatacaactttaaccaatgtagatttttactagacattcaaacttaaaaagaaaggcacgattacagggtcaaattttgtaaaataaagtttctctctgccacctaccagcccttctcagttgagaaatccgcaaaatatgttactgtacttaacttagttattatatatagattaaaagcttcaagctgcttactgtctagcttggtccttactggaataggttacatttacaactgcagtttccgagtcagtgttcactagaggaagagaaaaacgaagagaataaaagttagttttctttctacttccttccttttacaaatttgaaagcaattcagaagacatgtaccttgctcacagctctccaccactccatactggactagtaaactatccagcacctatcaggagggggagagaaaattataaattttgagtttcccaagttattatcaagggcaggaatatgtcttaaaatcactaagtaattgtgatggaaaagagccaaaaaattatctggggctttggactgcagaactaagggatggataccacaaatatcacactcagacttgtctcttctgccctctcctagatccctgacattaatctcatttcctatggctaaccaagaactggctcagaaaagtatgcaaagccacagccgcctggttcctgaggctgaaggagaaagagcatatatttctcatacatacacaaacacatcatcatactttctccttgtaaacaaagtcactagacaaggaaccaagttacaaactaaagtttaacagggcgcggtggctcgcacctgtaatcctagtactttgggaggccaagatgggagcatagcttgaggccaggagttcgagaccagcctggtcaacatagtgagaccccccatctctaaaaaataaagtaaaataaaaagagaaaaaaaaaactaaagttttatctataagatgttcttttccaaaggacttcttttacagctcgaatggttcttacaaaacagattgctcaaggcaggctagaaaaatgaagacagcacagtgcatactctacctggagtggaatttaaagcccaacataaatacatagacagcaaaagtgtgaaatgaagcaaacatttctaagtctacacggggttgggaaatgtacaatttgaagctgtctatgtttttaccatctttcctgtagctgtattattatactatgcatgttatccaaatggagaggctgttagaacagtaactgtaagtttattataatatcaactgcagatgtacgtctcatcaatataaaccaaattcaggtgtccttagcttctaagagctatagcaaaacaaagtaagtttctgtaaattatagcaaattacttactcatcagtttaactacaaattttcttatttatttatttatttatttatgagacagggtcttgctatgtcacccaggctggagtgcagtggcatgatcacagctcactgcagcctcaaccttctgagtttaagtgatcttctcacctcagccatccaagcagctggcactacaggtgcacgccgccaccctcagctaatttttaaaattttttgtagagatgaggtcttactacgttgcccaggctggtctcaaactcctgagctcaagggatcctcctgccctggcctcccaaagtgccaggattacagacgtgagccacttagccctagcctaactgcaaagttaaaagggcggttccttgaaaatgtttttcaggtgccaggaaatagaaaacaaattttatggtaatttactactaaacttaagcaatttcttctaaaggaaggtttatcttatgtggtatattttaggcttttgtctactgtttccagtttgaaacatataacaaggtttgtctggggtgagcttctgtttttagttttgggacagggtctcactgtcacctatgctggagtgcagtggcacgaccatagatcactgtagcctcaaccactgggctcaagcaaccctcccaccccagctttctgagtagctggcactacaggtgcatgccaccacacctggctaatttttaagtttttcgtagagatgagggtctcggtatgttgcccaggctggtctcaaactcccagattcaagggatcatcccagctgggcctccccaagtgctgagattacaggcgtgacccagcacctggcctggtttttcttttaaataaggttaatacctatttatgagtgaaatgccctttatttttatttggtaaatttcctttgcatgaggtaaatttaatttttatttggtaaatttcttttgcatgaggtatacacacagaagcacattaatctttgtctctgattatagctattcttaaatcacaaaaagacattcaaatatttcatgagtgaagtgaatacttcataggaggaaatcctggtatatcttataggaagagtactctgtaaaagtgcttgtctgttttataggtgaatttgccatgtgatgttgatcacagacacattttataaacgccaaaaattaagaaacctctcacgttgccattcaaagataaaatatacaacacataattccttaaattaaaaacaagggtggccgggcacagtggctcatgcctgtaatcccagcactttgggaagccatggcgggtgtatcacctgaggtcaggagttcgagaccagcctggccaacatggcaaaaccttgtctctattaaaaatacaaaaatattcgcagggcgcggtggctcacgcctgtaatcccagcactttgggaggccgaggcaggtggatcacgaggtgaggagatcgagagcagcctcatcaacatggtgaagccccgtctctactaaaaatagaaaaattagttgggcacggtggtgcgcgcttgtagtcccagctactcaggaggctgaggcaggagaactgcttgaacccaggaggcggaggttgcagtgggctgagatcgtgccactgcagtctagcctgggcaacagagcaagactccatctaaaaaaaaaaagaaaaaacaacaaaattagctgggagtggtggcgggtgcctgtaataccagctacttgggaggccgaggcaagagaattacttgaacctgggaggtggagattgcagtgagctgagagcacgccactgcattccagcctgggaaacagagcgagactttgtgtcaaaaaaaaaaaaaaaaaaaaaaaagcgggaggttggggggtggggggtggcggtgcagtgggcaacctacttattttctaaacaaaaatgaaattttttcaatacgaaaaatgttttacttcatacttaagtcagaattctaacaaattcattccaccttcagtaatgaagtcaggaggaaaagtatgtctaccattaaaatttagcttttaaatgaaagccacactaataataatagagctttacagcaacttggatggaggtgggggtagcggaggggttcagggactaggaggtagttgacagtttaatatgttatttaaaatatagcttttaggaccagacacggtggctcactcctgtaatccagcactttgggaggccgaggcaggtggatcactagaggtcaggagtttgagaccagcctggccaacatggtgaaaccccatacctactaaacatacaaacattagcctgcagtggtggcgcatgcctgtaatcccagctacccaggaggctgaggcaggagaattgcttgaacctgggaggtggaggtggcagtgagcagagattgcaccactgcactccagcctgggcaaaagagcaagattctgtctcaaaataaaatttagtttttaaatgaaagccacactgatagtagagctttatagcaacttggatggaggcaggggtagaggaggggttcagggagtaggaagtaattgccaatttaataagtttaattaaataaacatccttcttaattcttctgaaaagcaatttgttcagtaattaagtatattagtctccacacagattaccttatgccaccttaacttttattactcttagagataacactacaaaagttaaacacctgtgatctataaacaataccgactaaacctacaataatgtcaaggcaacaaatgttcttcaaaagctacagtgccaaagtgataaatatttatatacacacacatacaaatgatacaggtaaattttttaacttaaaaaaaatcgggggacaatcctttcatgctcttcctttccaagttaggcctggtagaatggcttctacgaagaagggttgtgacaagaagggccgctctgccaccaacaaggtgatgacctgagaatgcatcatcatttacaagggtatccatggagtgggcttcaagaagactgcccctgggcattcaaagagatctggaaatttgttatgaaggagatgtgttcactgacatgaggctcaacaaagttgtctgggccaaaggaataaggaacgtcctataccacaatctgtgaacagctgtccaggaaatgtaatgaaaatgaagattcaccaaacgagctccatattttgattacctatgtacctgttaccactttcaaaaatctatagtcagtcaatgaggatgagaactagccaccgatcatcaaatatgttaaagttataaaaccacacacacacacaagtagaaatatacattaaaattttcactgcatatattcaaaacaaaattgcctgtatagttaaatattctattcctaagaatagataaatgctattggttgtcaacttccgtgtaaatctttttttttttttagacagagtctcactctatcacccaggctggagtacaatggtgcaatcttggctcactgcaacgtctgcctcccaggttcaagcgattctcctgcctcagcctcccaagtagctgggattacaggcacacaccactacacccagctaattttcgtatttttagtagagacggggtttcaccatgttgcccaggctggtctcgaactcctgacctcaagtgatccacccaccttggtctcccatagtgatgggattacaggtgtgagccaccacacctggccatgtaaagtctttagaaagataactagaaactacaatcctgtgcactttttttaaatggtgagttttattgtctgtgaataatacttcaacaagcatggctttaaaacaaagtaaaaaagaaaaaaaaaaaaaaaccacaagcaaaaaaacccctctaatccttagaagaaataggtgcagaatcaatcttggtacctagctgtggaaaaaatttaacaacacaacttaggagattttacatagccccatagatggatttcagtggatctttgatgtcttactcaaagtttcatgtacaaggcttggaagtaatgacaacagaatagggaaagggctgtcaatagcctaataagattcccaaatctcaaaaggatttccaacccccaaatgacttgaactgtactatagtaatcccatcaatcttaaggcaggccattatttgaatatgctcttttatatcaaggcctatcaaatggtatcatgccactccagcccactgaactctcaaagaataaatacaacttacacttggtaagttctcacattttgctttttttttttttttttttttaaagacagagtcttactggagtgcagtgacatgatcttggctcactgcaacctccgcctcccaggctcaagccattcttgtgcctcagcttcctgagtagctgggattacatgcatgtgccaccacgcctggctactttttgtattatagtagagacaaagttttgccatgttggccaggctagtcccgaattcctgagctcaagtgatctgcctgcctcagccttcccaaatgctgggattataagtgtgagccacagtgtccggccgcattttgcttaattctgcattaaacaggaagataagacagtgttcctgttacctgtcacataagctacttatgcacctgtttttgtctcctagattcttgtcccctctcagtactgctaatcattctatgtcagccacaaatacttcttttaaacagtcttaaaggccaaaaaaaaaaccacgaaaaaaaacaaaaagctttccactctatatttccaacactttcacaagttcccatacctaaataaaatcttaaaccagaaaggaaacatttctctatgcttaggtaagtttaaattccaacgacaggggagggaggaaggggtataaatgcaaagtaaagcctcatagaaaatgtctttctagaattcccccgttatgtatttaggacgtgaaaccctcaaatgttcagcctttttaaaaaaaaaaagttcatccacggctgggcgcggtggctcacgcctgtaatcccagcactttgggtggccgaggtgggtggatcacttgaggtcaggagtttgagaccagccgggccaacatggtgaaaccccatctctactaaatatacaaaaattagctggacatggtggcacgcacctgtagtcccagctactcgggaggctgaggcagaagaatccttgaacccgggaggcagaggttgcagtgagctgagattgcaccactgcactccagcctgggcaacagatagagactccatctatttaaaaacaaaaaaaaacaaaaaaacaaagttcattcaaatgtataaacagtacagaaagaatcacatgaaaaatgcaaagattatcacttcctgaatgtaatggtacaaaattaagatcactcataatagtctgaagtagaaacaacccgaatgaatgcttactgactgatgaatggaaacaaaatgtggtatatttgtacaatggaatattattcaaccataaaagggaggtacttatacatgctgcaacagacagaccttgaaagtattatggttaccttgttagtatagcgaagacagaaagagagaaagagagagagaaagaaaagaaagaaagaaaaaaagaaagaaagaaagaaagaaagaaagaaagaaagaaagaaaagaaggcattatgctaaatgaaaacagtcacaaaaaactacttattatatgatttttgtttgtatgaaatgtccagaatagggaactctacgatagacagaaagtagattagtggtttctatgggctgaggaaagtgaaagtggagggtgacagttaaatgtttctttttgaggtgatgaaggtgtcctaaaaatgtggtgatggttgcacgtatctattaacatactaggccgggcgcggtggctcacacctgtaatcccagcactttggaaggccaaagcgggcggatcacctgaggtcaggagtttgagaccagcctgaccaacatggagaaacctcgcacctactaaaaatacaaaattagccgggcgtggtcgcgcttgcctgtaatcccagctactcgggacgctgaggcaggagaatcacttgaacccaggaggcagaggttgtggtgagctgagatggcgccattgcactccagcctgggccacgagagcaaaactttgtctcaaaaaaaaaagaaaaaaaaacttaaaaaaaaataattgtacactttaaatggtgaattgcatagtatgtgaattatatctcaataaagctgttaaaaaaatactaaaagcaactttaccaggtaatggcctagttttgccttttaaactctgaagtattattgatcacttcttggccttttggccaagcatcatccacagaaccggcctagtctggttcagctttgtgtgacaaaatggtgatttgttcttcagttgccatggatccccaggttgcaagttctgtaacctgagcctgtccagatgaaccacgcatgcaaccacaagcagaacctaagtgcctggaccgagacaggaccaaattaagaagtggacaccacatgacatgatccatgatccaatcagattgagccctggtgtcacctcctggtatgatccagtcagatcacacctcctggcatcacatcattgtaagattcaatcagatcatacctcattaccctctgtctataaaatatgtcccagcccccagctgggggagacagatttgaacctgactgtctccttgcttgacagtcttaccacgaacttttctctttacaaaagaacctatgctttggtgtttgctttccattgcacatggacaaacagaaccagtttggttcagtaacagtatcattgaaatacagaataaactgcaagaaatttgattcactttgacattatgtatacactcactaaactatcaccatcatgacaagtttcttcatgcttctcttcaatctagtagcctagtttattgacacatatagagatcactgcaataaagacagtttaaaaaactgtctttgacctgcaacgtgatcagattttctcagccacataccagatatatccccacctccctcacaaaactggctgtattttagttgataccactatgggcgtgaggtagataatttatgttctgcagataagccttctgctgactgcttattctgcatacccactgctcaagtcccatcactcctgggctatctgaaccaagtctgattagcatgcttgcctgtagcctaacactccatgactatatcctcctgccagcagttactacccttctgtggtttcaaattgccagtataacttgtccaaacttcaacatggcataagaggttgtcagttacctggtactacttctctcttccatatatccaacatacttcccacacctatgctctagtcacgccctcaaaactgggtaaagtacctctctcgtcatctccctaatacccattcttggaaatgaaagcaatgtcactttataatctctttcctgatctttattttcccactagactagtgattattaaccatagtgatgtgattgtcaggtgtgtcacagtaatctagttttcagagtcacactgacttccatgcttaagctggcaggtaatttatcatacatacgatcttagattccaaatcttttttatttgactgttacatttgccttatgtgtttcagaagatggaacaacaatgtcgggcattatagtctgtgtaccaatatatatcctgaaaatctctctggaaatgggttactccttcaatgtggctctaacacagagctgcactatcccataaacctcataagggaaggggccatgtcttacctttgaactcactgctcaggatctgtgatgaacaataaaaggttaaaaaggagtcacactatttttttgttctacagggcaaaggaagctagttctaggttttttggtttttttgttttttttttttaagacagagtcttgctctgtcacccaggctggtgtgcagcagtgtgatctcagctcactgcaacctccacttcctgggctcaagccattctaccacctcagcctcccgagaagctgggattacaggcgtgtgccaccacgcccagctaattttttgtatttttagtagagacagagttttgccatgttggccaggctggtctcgaactcctgacctcaagtgatgtgcccacctcggcctcccaaaatgctgggattacaggcgtgagtcactgcgcccagccagttctaggtgtctttaaaagtccataataatataagcaaacaggtatttgtcaggaatttatacaaaagatatagaagtggaacaagcattacaaaaatcacagtgagattaaagtattaataaaatgcaaagcgggatatttaatgcttacttgccccaacaaacaccttgccaacacacacacacacacacacacacccttccaagcaccaaagccaatgtcagtcattggggaggggtttctagaaaggagtcaccttgactactactcattgcaacaagagaggcaaaaagtctccacagaatcacccttagcgctagggatatggagatgaagggaacatccttcaaacagctcagcacagtttatacaaacaggaactacttatctgtcatgggcaagatcatctcaggaactgttcttttacatctatttgtgagaaatggctatattacaaaatgaagaacaatctgtattgcaggttccaaataatcatttccagttaaatattgatatataattctaaaacaaaataaagaaatatccaccttaatgtatatttctctaaaatgttagcaccgtaattacttggataacactcaaaccattcctcacactggtgtgaaaatgactgtcaagttaagaaagccagcaccacagaccagaccattaataagattgtaaaccatgctgcatatcccctttatcatcgaaaagccccagagggaagctcagcctccatcataccacacggagcaaagcgtcccaactttctagccactttcaatgttcacaagttagatcctctaacatggggaggagatgatgctttaggactcctaggagtcatgtgatcagagcctctgagagagaacagtccaagttatccggccacactggactctctgagagagaacagtccaacaatccagccacactgaagtcacagtggaaaaaccgaatccagagcttaaggggcttacgttatgtttctctttggcaatgctgagctagactgatttttatttttaatttattttttatttcaataggtttttggagaataggtggtatttggttacatgaataagttttttttttttcttttttgagatggagtctcactctgtcacccaggctggagtgcagtggcacgatcttggctcaccgcaacctccgccacccggggttcaagcgattcttctgcctcagcctcccaagtagctgggactacaggcacgtgcctccacccccggctgatttttgtatttttagtagagatggggtttcactatgttggccaggctggcctcaaactcctgacctcgtgatctgccccccctggcctcccaaagtgctgggattacaggtgtgagccactgtgtctggcttacgtgaataagttctttagtggtgatttctgagattttggtgcacccatcacccaggtagtgtatactgtacccaacatgtactcttttatacctcaccctcctcccaccctttccgccgagtacccaaagtccattgtatcattcttatgccttcacatcctcataacttaactcccacttatgagtgagagcatacgacgtttggtttttccattcctgagttacttcacttagaataatacggaactagactgattttaaaagccgagcagaacaagtcacaccctactataaactctaagagatccctaacaagtgccctgaaggccgtgttccactcatcctttaaggccattctcttctctccaaccacaccagccttcgttcagtcatgaatcagggctgctaacatttgagtgctttctggcagcagcattgtcccaaatgctttatctactttaactcaaatccacacaatcccatgaggcaacattattccatgttatagatgggcaagctgcagcacagaaaagttcacagtgtcagaacttggacagataaatgctggagaaatgattcaaactccagctcacagattccagagcccatactcttaatcacttggtctaataagttgcctcatttccctatgcaatttaaataaaatataaatacaccgacggaaaccagttcaatccttactcggccattacctgcactagaaaatcaaatctgtccataggcaggttaagagctttattaactcccatgtatccccttgctcatgttccaagtactaaatacgatacttctatacatcttagtcagaagaaggtactagccagcattaacttgtgctacattttactcacagaaatgctcataaaaacattcaaaatagttcaatgttaggtggtttttgaaccacctgctttcaaaacagggacttcccccaacccctagaagaaaccactgtcgctttggtggggtctctccaggtgtttttagaagtgtgtgtgtcacacgaaaagacgctctgcaccattagtcattagggaaatgtaaatcaaaaccacaaggagataccacttcacctccattagaatggccataattttttaaaaagaaggaaaatatgattcaaggggcatcataaaaagaaaaacaaaggaaaataatgagtgttgacacagatgtggaaaaatcaaaaccctcatacattgctggataaaatggtgcagctgctatgaaaaacagtacagcagttcctcaaaaaaaattaaaaatagacctaccatatgatccagcaattccacttctgggtattgatatggtttgaacattgtgtcttcttcgaatctcatgctgaaatgcgatccccagtgttggggatggggccaggtgggaggtgttagggtcatgggggcagacccttcataaatggcttggtgccatccttgaggtaacaagtgatttattgctctgtgagctcacatgagatctggttgttttaaaagaggctggaacttccttttctctcttgctccctctcatgccatgtgacatgcccactcccctctacctttcaccatgagtaaatgctttctgggccttgccagaagctgagcagatgctggagccatgctggtatagcctgaggaactgtgagccaaataaacctattttctttacaaggtacccagcctcaggtattcctttacagcaacacaaatgcactaaccgagtatacgtccaaaagaactgaacacagggactcaaagaagtacttctacacccatgttcatgggagcattattcaaaatagccaataattgaaaggtgaaagcaacccaagcatcctctgactaatgaatggataaaacaaaacatggtacatataaacagtcatccctcggtatctgtgagggattggtttcagcaaccccctaccttggataccaaaattcacagatgctcaagtcccttatataaaaatagtatagtagaggctgggcatggtggctcaaatccataatcccagctctttgggaggccaagttatcacttgaagcaagggatcaattgaggccaagagtttgagaccagcctgggcaacataggaaagaccccatctctacaaaaataaaaataattagccagatgtggtggtgagtgcctgtactcccagctactcgggaggctggggtggtaggactgcttgaacccagagttaggaggatgcagtgagctatgatgacgccactgcactccaccctgggtgacagagtgagactctgtctccaatagtgacgatgatgatgatgataaataagtaaaagtataaaaagaaaatgatttgatatcgggggaaattcacccccgatatttcacataggttcttttctatattccctaagtgtcggccggtctgagaaataaagggacagagtacaaaagagagaaattttaaagctaggtgtctgggggagacatcacatgtcggcaggttccgtgataaatgtccatgaaatcttcacagtttatgttcttctgccaaggcttcagccggtccccccgttcagggtccctgacttcccgcaacaattttatattatgtgaatttctcaatttttaaaaaggtatgtgtatatgctcatatattcacatatatacccaaagagcaatatttgttgagttttaaattttcacactagagtgtcaaatactgttttaaacattttatataatccatcttatttatgcctcagaatgtagcaattatccccatttcatatatgaataaactgaggtcgattttaagtaacttgcttaagtatgacattccttatcttgctaccctcccccaccaccccaatctgtcatcttggtgatccatccgtgttggtaaatgcaaacctttggaactgccacatggaattcaataggtgggagtcccagctattgatctgctatctttctttcattccacccccttcaggcatagggtcccccaacatgccacacagtctgggggagtcaagcaaagaactaggacagcactgactgcccaggcccccttctaggcttttcgccgctaaaacaaaatgcaaaggctagagaatcctagaagcaaacaccagttttagtaactagcttactcctttagcagaaaggcaggaataccactccaaacagctataaattactagagaaaaagggaaagacagcagttcagaacaaagcctgattacaactccaaacataattctggtaaaatcacagaataagaagtgaattttctaaatgaggtgataaatgtccacgattgtatggtctccaaaagcagtagcagaccatcccagatgctggcattttacccactacccctatttaaagcttagtttaaaagtaagaataaaagcaactggaggaggagaagaggtagattccaaagtcaataatgataggaatgtttcctacaagaattagtccttcaggtgtgcagcagttatccttctggctctatggggccttataataaaattcctaaactagttcaataaagggaaaaaagaaaactcaatctctcactaccgacttatgctatagaattgaatttagcatgagcagttctcaacatcccatcaataggtgcagttaagaataccacactacatgaaaacacatgatttggtaaaactgactttaaaatacacaaataattttgggaaaacacagcagctccacttgcaaaagggcaaaggaatcacagctaacagatgctaacatcaacatacagcactaacaagggatcactggaagaagtcttaaactctgctgggaggagtgttacttgagatatttctcaaaataaatttagcaattaaaaaaagccttgaggccaggcgcggtggctcacgcctgtaatcccagcactttgagaggccaaggcaggcggatcacctgaggtccggagtttggagaccctatctctactaaaaatacaaaaattagccgggcatggtggcgggcacctgtaatcccagctactcgggtggctgaggcaggagaatggcttgaaccgggaaagcaaaacttgcagtgagccaagatcacaccactgcactttagcctgggcaacagagtaaggctccatctcccaaagaaaaaaaaaaaaaaaaaagaaagaaagaaagaaaaagccttgaggctgggcacggtggctcacacctataatcccaacactttgggaggcccgaggcaggcggatcgcttgagtccagcaattcaagaccattttgggcaacatggcaagaccccatctctacaaaaaatacaaaaaattacctgggaatggtggtgcatgcctgtagtcccagctacacgacaggctgaggcaggaggttggcttggcccagaaggcggaggctgcaatgagccaagatcagcgtgggcaacacagcgaaacctgtctcaaagaccaaaattaactaactaaataaaaaaaccttgaaagattgctaatctttgacctgctaattttatttctgttcaattgtcactaaagaaatcagcaggaatgtgggtgtaaattcatccacagatatgttcacaactgtggtaatggttaaacatgaggaatggttaagtaaattaccagttacacatagaacagaaaaaacatccattataaacttaaggagtccaattacataatgtttatgacaaaatttaaaaaaaaaactgtgctaaaaagaaaagaacaaaaaaataaaacctttgtgcttcaaagaacactatcaagaaagtgcaaagacatagataatgggagaaaatatttgcaaatcatatatctgataagggacttacatctagcatatacaaagaactcttaaaactcaacactaaaaggccaaataacccatttttttatgcagaggaagtgaatagacatttcctcaaagaagatatacagatgactaataagcacatgaaacaatgctcgacatcattagtcagtagggtaacagaaatcaaactaaagtgacttatcgcttcacacccactaggatggctataattgaaaagacaaataataacaagtgtttaggcaaaggatatagggaaactggaaccctcagacatcgttggtgggaatgtaaaatggtacagcctctttggaaaactgtctggttgttcttcaaaaagttaccatatgatctagcaattccattcctgggtatacacccaaaagaactgaaaatctatgtttacacaaaaacatgtacaccagtgttcagagcagcatcattcaatggaaacaacctaaatgtccatcagctgctggatggataaacagtaagtggtatattcacacaataattattacccagccataaaaaggaatgaagtacctactaaaatctggctgcaccttgaaaatattatgctaagtgaaggaagccagacataaaaggccacatatatatgattccttttatattaaatgtccacaataggcaaagctagagactcagaaagtagattagtggtttctagggcctgggaggagactggaagataggaggggcaagtgactgttaatggctatagggttacttttgggagtaattaaaatgtcttaagattagtggtgatacttccaaacctttagactatactaaaaaccactgaattgtatgcttcagaaaggtgaattttatgacatcaaatatagttcgatttttaaaaaaattaaaaatgtttaaaacaggatataaaattatacatgcaagacccaacgatgttgaaaaatgcctaatcattaaactgaactattagtcacggaataatgttgccattgggagaaagactttttcttttcacttttcaagttttctacaaggagtatataattttagaatcaggaagaaaatgaaaacaaatatcaaatctgaattacactggcctttagatagttttcaaaaaaaaaaaaatgccaggaaaatagacatttctcttcttggtttttttttgagacagagtctcgctctgtctcccaggctggagtgtagtggtatgatcttggctcactgtaacctctgcctcccaggttcaagcaattctcctgtttcagcctcctaagtagctgggattatgggcgtgcaccaccatgccaggctaatttttgcttgtttttttttttttttttttttttgagacagagtctcgctctgtcgccaggctggagtgcagtggcatgatcttggcttactgccacctccgcctcccaggttcaagccattctcctgcctcagcctcccgagtagctgggactacaggtgcacgccaccatgcccagctaatttttgtatttttagtagagacggggtttcaccatgttggccaggatggtctcaatctcttgacctcgtgattcacccaccatggcctcccaaagtgctgggattacaggtgtgagccaccgtgcctggccttctcttctattcgtaaggctcccccggaagagtactggagaaacacaattgaatgagcagaaccaaatgtatgaattatttggagaccaagcagaggaaaaaaagatgcttaccacaccaactcattgtggcatattgaacacactgctaggacaaggtcagagttctatggaagaaagcggactagtggagtccctccctccattagcatttgtttcctatgatggacatgtgtttcataataagttcagctgcttttgaacaatgggtggacaaattatcagtgttacaaatgtctttgaaattttttccttttgaaatttattggtggggtggagcaggtagttctacaaggcaaaccaaggtttccccacacccactgttgctctgtctcagctagtgtgtattcaagataaaggcattttttgatcccagccatgttctcttatatctgctgtagttaaaaaactgcttaagtccacaagtactgcttttggtccagaattctattaatccaacttttcactcagatcctacccctcagatgtgattccacttcatgttgtttagaaaatatttgggtaccaatttggatagcacctattgcgaatgaactgggactagaagcaggcattctcaagtaattttaaaggttttaatgagtaacaggggtccattaataatcaaggagaagttatggttagcagaagacagttcagttaatggcaaatcttttaggaaatcaattctataaaacagtaaattgccctcacagaagctctattcaccaaccaagttcacctggagtttaaagatactacaaaacaaaatctcaattttctagtcttcaaactgctcctccccatgtgcctgcttctgtcctcaacagcaggattccagagttgtgtctgcaactcgccactcccagtccatacttggtttggaacctatatgctcttatagcttatatttggtccctacaaaatatacatccatgcactggctatacacggggcaattccatgcatctcttattgttaacgagtgaagtcttacacaggtgcacttgagaggtcaagccatggtcagctaactggtgagaggtcaggggatgcagagaatttgaatgtcaacttctaagatgggttgggaaagtcgtaacttggtaatgtctttaaatataaaaaggctatttcaaaattaatgttcagccgtgaatacaaaagaatacccactgcactgtgaattttgaggtaaaaaccgtggagactgcccactatgcctcttttttttttttttttttttttttgagatggagtctcgctctgttgcccaggctggagagcagtggcacgatctcagctcactgcaacctccgcctcccgggttcacgccattctcctgcctcagcctcccgagtactaggactacaagtgcctgccaccgtgcccagctaattttttgtattttttagtagagacggggtttcactgtgctagccaggatggtctcgatctcctgacctcgtgatccatccgcttcggcctcccaaagtgctggggttacaggcatgagccaccgtgcccggcctactgcccaccatgcttcttggccgatgagtggcatccatgcaatttaatatggttcaagactgtcatacattactctcatccactcccaactgattccctactaactacctttaaactagaacacactatgtcttcttacttctaggacacaatccctgatcaccccagtcttggttaactccctgtactgggatgaatagcgccctttaaaaattcaccagtacctctgaatatagctctaatccaatgactaatatccttttaagagggaaatttggacggacacacacagggagaacacaacgtgactacaaaggcagagactgggatgatgcagctacaagccaaggaacagcaaagattgggcacagccactagaggctaggaggaagtcttgccagcacccgatggcagacttctggtttccagaactaggttttaagcttcccagtttgtggaaattagttacagcagccctgataaattaatacacctctctcccatcttccatagtaagcacccacctccaacctaacccaggggcttgtttttactgtggaaggccattcacttgtccatgtctaaatcagactcaacttcacagctgtatctagaacaggccctagcacagagctatagactttgggactcccacacagcaatggagaaatccctcctcccagaagtctctatatccacacagtaatcagccaccaaacacactggattcttcacacacattattccacttagtcatctgaacaatcttcaaaggcagatattaaccctgttttcaagatgcaaaaattgagtttcaaagaggaaaggccacatgcccagcgggacaggaaatacgagaagagtcaggatgtgaacccacactacgtgactctaaagtcagtgctcaataggctacacccgtttctcaaaaagtcaccaccttgtaaggaaaatgattcttcaaaagctcttcataccagcaagcacagaaagttgataaattttgaagctggttgacaggtacatgaggatttattatatactctctacttgtatatgcttatatgttcattaaagtgatggctgattttaaaattttaagttaaattttaattttttttttagatggagtctcactgtgtcacccaggctgcagtgcagtggcatgacctcatctcactgcaacctccacctcccaggttcaagcaattctcctgcctcggtctcctgagtagctggaattacaggcacgtaccaccacgcccagctaatttttgtatttttagtagagatggggttttgccatgttggcagggctggtctcgaactccagacttcaaatgatccacccacctcggtcggcctcccaaagtgctgggattacaggcttgagccaatgcacccggccttaaaacttaatttttaacgtcaaagtccaaagtttaaaattaacagtaatcactgggcaaagatgtaacatttgcactgttcattaaaatgccactatgtgacctggtgcagtggctcacacctgtaatcccagcaccttgggaggctgaggcgggagaatcactcaagctcaggagactagcctgggcaacataggaagaccccatctttacaaaaaataaattagccaggtgtggtgacacacccctgtggtcccagctattcaggaggccgaggtgggaggatcacttgagcccaggaggttgaggctgcagtgagccgtggttgcagcactgtactcctgcctgggcaacagagatgctgttttaaaaaaacaaaaaacaaaaaacttcactatgtaatgggcactacacaggttattatctctgaatacaacaaaacaggttggcaggatagcaactcctgcatctttcagaaaacactgtagtttgagtaaaatgaaatttgatcttaccaggtttttttttttccaagataaagtttcctaggatttcaactgtatcgtaagagaaatattctctcattgtttaacatattttatagacagaagcagtaaaattgctaaaaacaaattcaagcactacatctgtcaggattttaatcatgaccaaaagttcagctaaatacaaattcacttatatcacaatcagtgcctcatctgccatctcaataactatcctcctaccattaatttttatccaattgctatacaccttatggtaaaacaaaaatggccttgcccattagtgacacctcagacaagtaagtataaagatcaaaattctagaagcccataacaaactcaatacttaagcaaggctgggtgtggtagctcatgtctgtaaatcccagtgctttgagaggccaacgcaggggtggaggggtaagggagggtagagatttgctggagcctaggagtttgagaccatcctgggcaatacagaaaaacctagctctaccaaaaaaaaaaaaaaaaaaaaaaaaatcaatcagctaggtgcagtggcttgcacctacagatgcagcttcttgggaggctgaggcaggaggatcatttgagcccaggaaatagaggtgagctatgatggcgccattgcactccagcctgggtgacagagcgagactctgtctcaaaacaaacaaacaaacacacctaagcaaagccatgtgtggaaacaatataactacatagtattaaagactagtttatcaaaataatctaattatttattaaatacagggaatagtgatggaagtgtagcgcaaaaatcaggacacgtaggctgatggatttagatgtttacatgcaggctaacaagcaagtatgtgagtaacttttacaactcagtaataaagacaaataatccattaacagattggaaaaatgtctactcagattatttgtctaagaagatatactacaaatgctcaataaacacatgaaaagatgcttgatatcattagtcatcaggcaaatgcagacgaaaaccacaagaggataccactttacacccagtaggctataatcaaaaagtcagatcataccaagtgtttgcaaagaaaatgaagagattagaaccatcttataccgctggcaagaatgtaaaatggtgcagccactttggataacagtctggcaatttctcaaaatgttaaaacataaagttactatgtgactctgcaagtgaactcctagaaacatacccaagaaaaatgaaaacacatgttcacacaagaaatcgtacattaatgtacatagaagcattactatagccaaaaagtggaaacaaccaaaatgtccatggactgacgaacggataaacaacgtggtatatttatgcagtggagtattactcagcaataaaaagagtgaagtctggagccgggcgcggtggctcacacctgtaattccagcactttgggaggccgaggcgggcagatcatgaggtcaggagatcgagaccatcctggctaacacggtgagaccccatctctactaaaaatacaaaaacttagtcgggcgtggtggtgggcgcctgtagtcccagctactcgggaggctgaggcaggacaatggcatgaacctgggaggaagaggttgcagtgagccgagattgtgccactgcactccagcctgggcgacagagcaagactccatctcaaaaaaaaaaaaaaaaaaaaagaataaaagtctggatacaggcaacaacattgaagaaccttgtaaacactttcctaagtgaaagaagccagacacaaaagaccacatattatatgactgcatttatatgaaatgcacagaatagggaaatatagaaagattagcagatgcttaggactaagtggggtggggtgataggggttcagtggggggaaagaacaagagagcaatatctgaagggtgcagaatttgaggtgacaaaaatattctaaaattaattgtggtagtatgtatttgtgaatacactaaaaaccactgatttgtacactttaaatgggtgaattgtatggtatttaaattgtatctcaaagcagtttaacaaagtcctatttataagaatgagactggaaacaatttatacaaccccaacaaaagatatattagtcttttccaattatgcagccctttaaaaagaatggccataaatggatctttataaaacaacctggtaggcactgggcgaggtggctcatactgtaatcccagcactttggggaggcagaggcaggcaggttacttgaacccaggagttcaagaccagcctgggcaacatggcaaaaccccgtctctacaaaaaatacaaaaattagctgggtgtggtggtgcgtgcctgtggttccacctactcaggagggtgaggtgggaggatcacttgagcctcagaggcaaaggttgtagtgagccaggatcgtaacactgtactccggcctgggtgacagagtgagactatctcaaaacaaaacaaaacaaaacaaaaatatcctacctggtaggttaggtgtattaaatgaattttcaacttacaatattttcaacttataatgggattatcaggaccataaccccattataagttgataagccatctgtaaaatcaaacattaatgcctttcttatagaaattaaattttggcagtaaccaaatagtatctgggagtttctctttatagaagtgtttcaattaataaatgaaagaataatagaattggaaaatgacctttttgcctccctttatgaaataatggagctctcaaatctatggctgctaacattacaaaaagagaaaaccaagtatgtacttcctgacagaagtctgtactaccatctatgaagtattcttgcttaaagagaaagaggggaagtggaagggagggagaaagaaagtgaatctgaatatgcccagatctactgtggttctcaatcttggcagcacagtacaatcacctgaggagctaaaaatactgatgcctggatcctaagactagaaattcaaattagtatgagacatagcctggacattagaatttttaaaatttaaggttgagatcactgctctaaatctaaccaccgattcacaagaattcagaagactgaggaacatgtactgtacttcaaggatgaagtcagccaacctaaacatgacaggataaaagagtttcttcaaccaatggggtagggggtggggggaagataaaaaaaggaatgggaacctaaaagtcaagggacttaaatcgactaactgcaaaatataaacctcatttggattccccctaccgcccatctatttttatttttttattatttttttttttagaaagagagacagggtctcaccacattgcccaaagctggtctcaaatgcctgggatgaagcagttgtcttgcctctgcttcccaaagtgctgggattacaggcatgagccaccacatccagcctatttggatcctaatacaatttttcaaatgtgaaccaactaagatatttgaacagacttcatggtttatgagaattttttatatgtgatgatattgatttttttaagcccatatcttttagagatacatgctgaaataatttctaatgaaattacttatctaagatttgtttcaaattatctgatagagagaggtgggatagatatagagaaaatgagattggccttaagctgataattgaagttaggggataggtacatggggagatttattatactattctctctacatttgtaaatgcttaaaaattatccatttcataaagtttttaagatgtgaaatattggccaggcgtgctggctcacacctctaatcccagccctttgggaggccaaggcagatggagtgcctgagccattctccaataaaaggaaccaaagctccttagacaaatagctatttcaaggactgaagcagcaattctacaagataatcctgaaatatcttgtagtgccagaaagtacgtactcaaaaagaaaaaaccaatcgcaaccaaccaacaaaaaaccaccacacacagaaacacacaatgatggagtgaccaaagggacacaggagcccccaacagccaaagctggaacatcagaacagcaaaatagttaaagtagtattagactatagctcagagtacaaaataaatatccacaagccaaatgactgaacaaatagggaagattgaacagatctccaaggagagaaattccaaataatttatgtagacggtccaccctcaaggagatagagcgtaattctccactacttaagtacgggttgtgcaaagtattggcagggaggggtggtggtgcaaactaacaaatactatttcatccaggtgatcaaggttaacatcagtgggctgggcatgctggctcacacccataatcccagcactttggaggccaaggcaggtggatcacctgaggtcaggagttcgagaccagcctggccaatatggtgaaaccccatctctcctaaaaatacaaaaattaaacaggcatggtggcaagtacctgtaatcccagctactggggaggctgaggcaggagaattgcttgaacctgggaggtggaggttgcagtgagcagagatcacgtcactgcactcctgcctagcaacacggcaagactctgtcaaaaaaaaaaaaaagaaagaaagaaagaaaaaggaaggaaggaaggtaggtaggttggttggttaacatcaacatcagtggtaagtcatattgcttgtatgtgcccttgatataatgagaatgacattttatctgaagtcttcctcctagaaagtccataaacccagtctaataatgggaaaaacttcacacaagttccaactgagggtcatttgacaaaatacctgatcaatattcctgaaaactgtccagatcatcaataagaaggagagtttaggaaactgtcacagtcagtcaagagaagcctaaggaaacatgacaatgaaatagtgtcccagacaggatcatggaacagataaaggatattaggtaagaactaaggaaatctgagtaacaatatggaatttggtttactataaaccatgaaataataatttggttctttaattgtgacaaatgtgccatactcaagtattaatgttaataacagagaagactgggtctagggtgtgtgggaactctacactatctgtactacttccctgtaaacctatggttattctacaatttgttttaaattatctgatttaaattatctgattttaaaaaaggaacaaagcactgaaaacctgctacaatacccatgaacactgagagcattatactaagagaaagaagccacttggtatgtgaatatctcaataaagttattataaacacacacacatactcacacaatgagatactacacacctatggcaaggatgcagagcaattttagaatggctaatattaaaccaccaagtgttgtcaaggactggacctgctggtgagaacataaagtggcacaactactatggaaaagtttagaattttttttttcttttttttgagatggagtctcgctctgttgcccaggctggatgaagtgcagtggtgtgatctcagctcactgcaagctccgcctcccgggttcacgccattctcctgcctcagcctcccgagtagctgggactacaggtgcccgacaccacgcccggctaattttttgttttagtagaggcggggtttcaccgtgttagccaggatggtctcaatctcctgacctcaagatccacctgcctcagcctcccaacgtgctgggattacaggcttgagccactgtgcccggcctagaattttttaaaaacattaaatatatgatccagttattccacccctgtgtatttacctgagagaaatgaatataccaggaagaaaaactttctcctttatcaacttaggttcagtaattgagggcctacgtattcaactgacaatgcacagatgaacaggaggaaaaaaccaaaactttttcatacgcatatggaagtgcacaaaagcagtactctaaacagctaaaaaagggagtttacaaactcaattaaccgaggaaaaaggatacgggagaaaaggcttctatgggaaaataaatcggtttcaaggggaacagagataaattttgtcgtaatgtttgtttatgcagatgagtggtcttctccatctttttttttttttttttttttccagtccaagaacattccccaagggaggagatttttagcagcctcattcccagaagtttctgcctttagttaaagtaaggaatttctgattaggcttctttctgcatctgttgaatctcaaatgtctttagtttaaaataatcttcatactatctctgggggttacaagtgggtcctcacaaaagcaaacatccacatagagacctacacataaatgttcatagcacctttacctgtagtagttaaaaactggaaacagcccaaatgttcaacaggtaaacaagtaaatagtagtatatctacacaacaaaccactactcagctatgaaagggaataggctcttgactcacacatcataggtaaatcttaatggtttcacatgtgtatatgtatgttaaaacttatcaaaacgtgcactttaaagatgtgtttatgtccatcatacttcaataaagctgttttttaaaaagacctactaattcaacgatttaagttgttataaatcagaacaaaagtgagaattattcccttttttttttttttttaattgagacagagtctcactctgtcgcccaggctggagtgcagcggcactatctcggctcactgcaacctccatctcccaggttcaagtgattctcctgcctcagcctcctgagtaggtgggattacaggcacacgccactacacccgcctaatttttgtattttttagtagagaaggggtttcaccatattggccaagctggtctcaaactcgtgacctggtgatctgcccacctcagcctcccaaagtgctgggatttacaggggtgagccaccatacccgactaactcccaatgtttaatgtgtgaaaaggcttaaggtttaagtgagaaaaaagcaggaaattacatgcaatatattcagtactgtttttttttttaaattacaagactacacagatgggaaaaagaaattggatgataaatctttaatcaacacactgtaactgtttgcccaaaaagtgtgaagaatatcagacatatacagttggagaaaagaagccatgaatagaactgagagtcaaaaataaatggtcaggctgggtgtggtagctcatgctcataataccagcactttgggagaccaagtcaggaggatcccttgaggtcaagagttcaagaccagcctgggcaacatagcgagatcccttctgtaaaaaaaaaaaaaaaaaaaaaattagctgggtgtggtagtatgcatctgtagtcccagctacttgggagactgggaggtcaaggctgcagtgagccgtgactgagccagtacactccagcctgggcaacagagtgagaccctgtctctaaaatacacacacacacacccctttgactattggtcaaagataggcaaatatgccaagtgaaataacgatgctagtttttgcagacaaaattggctaatattttgaattatgttagcatgaagtatgctggggaggatatggaaaaacaatgtcttgtccattagtgggggaaagtataaagcaacatagaatttctataaaagttttgttaatatcaaatagcctaaaaattcactctgatctaattcaatttgtgtgtatacctgcatagaagtatgaaaggtaatatgccaagatatttttgaactttactttccaaattttattcaacgagcctgtatcacctataatggggaagaagtatatttaagtcattctttaactgaggcttctgaaaagaaaaaaaaaaatcagtttgaagccaaaataccaactaaacaagcgtagatctgtcccttgactgaccaagacaagaaaacagatgaagccactgagctacaggaaagcaaagagtgccgctagattagggtaaaccaccagagctcgttaggagtagctggtgggaagattcagacagcagggcaaccccactccaggacctcccactctggcacatgaatgaaatccctcacatgccagctagaattaaatacaaaacctgtaacagcacaaccacctttacccccttttctccctcttcatagcttgtgtataggcagcacaggaatgccaagaccacaactgtacagcatacaactttcgtttttgaaaagacagctaaaaactttacagctgtttttgtcaccttggatttattgttgccttttttttttttttttgagacagagtctcgctctgttgcccaggctggagtgcagtggcatgatctcggctcagtgcaacgtccgcctcctgggttcaagcaattctcctgcctcagcctcctgagtggctgggatcacaagcacccaccactacgccagctaattttttgtatttttagtagagacagggtttagccatgttagccagggtagtcttgaacccttggcctcaagtgatctgcccgtctcggcctcccaaagtgctgggattacaggcgtgaaccatcgcgcctggcttttttttttttttttttttaagacagattcttactctgtcacccaggctagagtgcagtggcacgatcttggctcactgcaacctccaccccctgggttcaagcgattcttgtgcctcagcctcctgagtagctgggattacaggcgtgtgccactacacccagctaatttttatatttttagtagagacatggtttagccacattcgccaggctggtctcgaattcccgacttcaaatgatctgcctgcctcagcctcccaaagtgctgggattacaggtgtgagccaccgtgcccggccttgtcattgccttttaaaatctcagttgtaaggttactgacatagccacaacccatccatgacactctcgctttccacgggtgcaaggacagctttaacagctgtaatgggtttagacactcagactttctgatctattcctggaagccagtgctgattaatttttaacttctttggaactgagccccaaacaaaacatgaaactgggacttatattacaatgactaaggtactacaagacatctacttagaatcaagtatcaccaaaggcagaataacctgagaaatgtttcatccaaaagattgcaaatgaaaaagtctttttaaaatgataaaaagcactgatcattgtctgtagacaggcccagtacacaccctagttgaataatttgtaacacagaaggtagaatggcaagatcaaaatgagtaagaacttgaggcaaggagaaggaatgtttctgtttttacaagtgaatgttcatgaaccactacttttaggccttactcttcaatgtatttagttcaagaaacaataagtaaattgctaagcatctgaaacaaaactgaaaatcgaacaacccagcaagtgttattaatagctcttctaggatattaatgacataaaagataatgcacccagattaaaacacacaatactggtgtcacccgctacacaccctaaccaacagagctaacctacagaaagtatttaaggtaagcagtaaagaaggagagactactcttctctgcattcatgaatgttgtaaactgatggccagtactgtccacagtatggcagatgtggccaaaatgagggcagaaccatcagtcccttcttcactaaccctaatgaaccaagacttcctcaagcttagctaagcctcaaatgagaaaggcaacactttctgcgaacatgtcacagtgctggatagcacaaaggctgacctcaagaaaaggctgattcagtaagtagtgctgtcacaaatggaaaaccatttggaagaaaaaaaaaaagacaaggacagcttatcatcatatatatatatatatatacacacacacacatatatatgtatatatatatatacacacatacacacatatgcacatatatatacacacacacatacacacacacacacaaatatacaactattaatgatagttaactctgaatggtaggattttaagcccttttttctgttttctacagtgaacacaaacacttttttttgtttgtttttggagacagggtcttgctgctctgacacccaggccacagtatgattgcatgatcacggctcactgcagcctcgacttcccaggctcaagggatactcccacctcagcctcccaagtagctgggactacagacgtgggccaccacgcctggcaaattattgtactttttttaagagatggggttttatcatgttgcccaggctgatcttgaactcttgggctcaagaaatcctcccaccttggcctctcaaagtactgtgattacaggcatgagccactgtgccaaaaacatttctaatttaaaaaattaaagtgagtggcatataactcccaattgctataaggtggccactcatcaatttcttaggagtttctagaggacactctgatatctgacttccttaggggacactcagcaagtctcattagcgtccttggaattaacccacctttgcttctgtgatcaagagaacttgctttcatccaactcaagatgtcttctgcccgctggagtggccttccagaaggaccctttacctacagaactgtgctatcacctcaccaatgttcactcagaatggtccttcatgctagtaccaggcaacgtggttaaatcagacaactcgttcacaaaagcctccctcccatacataccttgtaacatgtaaatcaataacaagttattattaataactaaaagctagttcaatcgtaaccgatgatcatctcatgcctaaggaatacgggcatgtgatcttctattcactgaacaaatgtcaacaaatgtcaaggacagctaagatcccaccctgcaataagcacagtttagacctgtagcaagtactatgctcaattctgaaccctactctaaggggctcggaaaccgtgcccccaaagggaaacaggctgagaggggtcagtggaggggaatctgggagggacagatgagtggtctggagagtttctcagacgatgaaccatttgaatgtgctctcttcacacattgggagaatttttatattctcaaaggagctaaaataaacatggaagttgaaatgaacaggctcttaaaagatcatctagcccaaggggggcaatcatgttcattttgcatgccaactgcaaacaactggctgtgattatccacagcctgtgtgagaaggattctgcggcctaatctaggatcagtgagaagagtctctccttgagagtccctcctgctgcggaaggaaggaggctgaacaagtaccatggattcccagcagtgaccttcaccaatggactggatacttaagaggccagtcgagttattaggagggtacacaaatccataatgctttcaagactttctgataaggcaaataaacagtaattcctacacttgtgtataccataatctttcagacaggtataggggttgtgtgattaaaaaaaaaattattagtgttataggtttctaaaggtaatctagttcacacaacaaggtctttcagctacagacacacctgcacaacttaaaaaatctacttcccaaaatgataacgctatttataatcagcaagactttttaacacatctactttggcaggccagggcaagctaagtgtataagcccaggagttggagaccggcctgaacaacatggcgaaaccctgtctctataaaaattacaaaatttagccaggtgtggtggcacgtacctgtagtcccagctactcgggaagctgaggtagcaggatcgcttcagcctggaaggtcgaggctgcagtgagctatgatcatgccactgcactccagcctgggtgacagagggagactctgtctcccctgcgcctaccctcccccaaaacaacaacaaaccatgagagaaaaataaagccaggaaaaattaagactgaaaataaattggtatgaagttagtggtgaagttaaatattctaacaatatatagtagaggtgacccttaaactccgtagcagacaacaccaaggcaaacacagtcagtgagaaattatgcaggctccatcatgcgctacaaagctgtctctggtagccaagggaagcatataagcaaaggtcctgttttcaaacattaattaaacagcacgtcagaatagaattcctaccatacagaaacaaagctgtgacaaaagaaaggtttgcttgtttagttaagcaagaaagaaattaacacaatgaagccatgtcctttatgggaaagataccatgtaaattatctgaagtcagaaatgtttgttcagctgggcaacttcaagtagtggtaaacaataatggaatactggaagtgcacagaacatgctcagaattgatgggcatcagatttgctgagaaagaagaacatggagtaatgatgggtgtaagctcagaggagcttagcattaatccaccctaatgaggctggcatctggaggcacagcctgctcaatttcacagccataaggagcagccctcactgatgtttctgacttctttgtgactcattttttcaacactaaagtctgaggttttccttaaagtttttttaataagaaattaaactttccccaaaatagaaagctgagtattatgatcaactactattagaaagcctaaccaaaacaacctgaactatttaaagcaagtaaccagatcaagataaaacacccgcaatatactttccaaaacatctgatccctgctagtgaagggccaacacagctggcaccaagatttccatttgccaccaccaaaaaataaaaaacaacacaaagaaacaaaaaaacgaaaacatttgtaagaacttcagtgatttctgcatcaataaaactcaatgacctcgggccaagtgcagtggctgacacctataatcccagcactttgggaggctgaggtgggaggacagcttgagcccaggaatttgagaccagcctgggcaatatggcgagaccccatctctacccccacccccccaaaaaaagaaaaaaattaactgaaaaaccaacaggccaggcacagtgtttcacgcatgtaatcccagcattttgggaggctgaggcaggtgaatcacttgaggtcaggagttcgtgaccagcctggccaacatggtaaaaccctgtctttactaaaaatacaacaattagctgggcgtggtgacaggtgcctgtaatcccagctactcgggaggctgaggcaggagaactgcttgaacctgggaggcagaggttgcagtgagctgagatcacatcactgcactccagcctgggcaacagagcgagactccatctcaaaaaaagaagaaaataacaaaaatacaaacctcaatgacccgagacaacaaatttatatcctattttcttatacccatccccctaccccacccctacacaaaaaaatccagtgagtttttttttttttttttaacccaataacccattacagagttgaaaaaattcccaaccaatacactttcagtgagtgaatactgaccagcaagtccacaccagccattgttctgggtctttgataacatgggaggacagagccctacccaccttagctctggtgggagaaacagacacaagtcataagacaattaaatataaagtgctggcttgggggtagggggcagggaggggtgcacacctatagccccagcactttgggaggcaaaggagggaggatcactttagcctaggagtttgatgcagcagtcagctatgatctcaccactgcactgggcaacagagaagactctgacttctgaaatatgtacttacacacacacacacacacacaatgctaagtcaaataatgaaatcacccaaaatagctggaattactggcagattgtgtagcaataaacctagttttctgaagaaaaaaaaaatacatgagataatgcaagcctacatgttaagtgctaccatagtgttaagtatgggagaaatacaggagagatgtctaatccaagcgtggtaggaatgatgtctaaattgagggctaaataattggtgagaataaagaaagatggaaaggatccagaacaaaataagactgttgggggggaaaaaaaagagcaaatggattcttggcaaagaaaatgtatgcaaaaagtcctgaagctaagagaaggatggggttgaggaagtaaagtacttcacagtactggagcacacagcatgtgaatttcagccaaaggacaaatgcctccaaaaaaagttaattcacagtgcagcagggcgaggcacttgtcttattcgctggttctcacattgaccctgaaaggacttttttttgttaatcccattttcacagatgggaaagggactctgtatggttgtcacttttatccaaagtctcatagccagtaagaagctgccctcaaagtccctaccctgtcttccattcgactattctgaggttcagacccagaaaccccatacctctgccttatattttaatgaaaagtatgtctccaggtttatgtggagaataaccaagacctcagaaacatttagtgaaaatcagagctagaaggaatctgtttttttgcgagttcagagaagctgacttggataagacatcaaagttgtcttgtgcagcaaattctcctccggcacatagtaggcactctgataaattcaaaaaggcttctaagaagaggcagaagcaaggacagggaaggagctcagctccacagctcagggagggtgacagaatggcctaaggcccaggagagcaccgtgttgtcaactgtcagtgtcaagcctgagacaggagccatgaactagcaccatctcagctctgatgttgaactgcagccgtctcctctaaggtctcaaactggccttataccaacacatgcctccttctatcatctaactagccatacgccatgcctccttcaacacctaactggccttacaccaacacatgcctccttctatcttgtcatctcataataggaatgctgcatcccctacatgaaatgacaaaatgtattctgcatagaaatccctctaggtactgaagaactttatcttaatgtatttcaccactgagtatttagagtccccactctcaaggctgtggtcctattagcatttatttgacacttgagtgctgattacactggtggtaaattgaataatggtcccaaatatatctacctcctaatgcttaaaaactgcgagtgttaccttatatggcaaaagggactttgagggtataagtaagtatcttgaggtggagatattatatgggattacccgggtgagccttatgtaatcatggatccttacaaaaggggcgagagaggaggcaaagtcagagagaagacaatctgaggacagaagcagaggctgaagtggtacactttgaaagaggaaaccattaggtatatctccaaatgctatccctccccccgccccaccccacaacagtccccagagtgtgatgttccccttcctgtgtccatgtgttctcattgttcagttcccacctatgagtgagaacatgcagtggttggttttttgtccttgcgatagtttgctgagaatgatggtttccagtttcatccatgttcctacaaaggacatgaactcatcattttttatggctgcatagtattccatggtgtatatgtgccacattttcttaatccagtctgtcattgttggacatttgggttggttccaagtctttgctactgttaatagtgccacaataaacatatgtgtgcatgtgtctttatagcagcatgatttataatcctttgggtatatacccagtaatgggatggctgggtcaaatggtatttctagttctagatccctgaggaatcgccacactgacatccacaatggttgaactagtttacagtcccaccaacagtgtaacagtgttcctatttctccacatcctctccaggacctgttgcttcctgactttttaatgattgccattttaactggtatgagatggtatctcattgtggttttgatttgcatttctctgatggccagtgatgatgagcattttttcatgtgctttttggctgcataaatgtcttcttttgagaagtgtctgttcatatcctttgcccactttttgatggggttgtatttttcttgtaaatttgtttgagttcattgtagattctggatattagccctttgtcagatgagtaggttgcaaaaattttctcccattttgtaggttgcctgttcactctgatggtagtttcttttgttgtgcagaagctctttagtttaattagatcccatttgtcaattttggctttggttgccattgcttttggtgttttagacatgaagtccttgcccatgcctatgtcctgaatggtattgcctacgttttcttctagggtttttatggttttaggtctaacatctaagtctttaatccatcttgaattaatttttgtataaggtgtaaggaagggatccagtttcagctttctacatacggctggccagttttcccagcaccatttattaaatagggaatcctttccccatttcttgtttttgtcaggtttgtcaaagattagatggttgtagatatgtggcattatttctgagggctctgttctgttccattgatctatacctctgttttggtaccaaatgctaaatgacgagttaatgggtgcagcacaccaacatggcacatgtatacatatgtaacctgcacattgtgcacatgtaccctaaaacttaaagtataataataataaaattaaattaaattaaaaaaaaaaaaagaaagaggaaaccatgaaagccaaggactacagccaggcactagaacctgggaaaggcaagcaaacggattctcccctaagacttctagagggagccagttctcatgacaaccttgactttaacccacagagactgatttcagactcctggcttctagaacaaaaattaatttctgttgctttaaaccaccaagtttgtgattaatttgttacagcagcataggaaactaatatacctattcttattttatgttagcaatgtaaattttctataccatcactcatattgaattgctctaaaataatacacctctcctccacctaaaaacagtgaagcaatattgatcagtaaaacaaaagcagaatgttgactatcattaaggtcggtagatggggggttcagtatactattttctcaatgtgtgtatgtttgaaaactcccaaagtagagagtttaaaaagtcactttaaaattcctaagaaaggaatcacatttctacaccatctcccactgagccatatgagccagtttttttttccccaacattggaacaagttgtcatatctttacttcaatgccacaccaggtccttggctagtggataaggcatacatggtataaaaagtttgcatccttaaacatgttctcagtacatctaagaggcacacaggagctgagcaactaaagaaacatttgtgtttccaatatcttgtttctccaggatagtaaatcatgcattaaaacaatgtgaaaaagttctccaaagtattatattactttttgctgatcacaaataggcaaatgcatctaagattatctgatttctaatgcaattcaattctgtgaaagtctaaaacaaagtattaggttggtacaaaagtaattggagttttcaccattagaagaagtagtatctctaagctatataataagcaggtggttttggacttagagagccacagctgaccttgtcctgctcctccagggtaacattttgaggacaatgctatcagaggttcttcatatctctgtgttggtgtggcagcctaagtactgtctgccacaccaacattacaaccaaaaggggccattctgactaaggctgacccagcctcagaaagcaaggcacgtgataaaagcacatccttcaatctggctgtacttgttccacccactgaaaattaagaaatacttagatgcccaagaatttccatttcacacgagaacaacttcaaaagccacctcatgactgtgtgcatggatccaaccataaatacctacacaagcacacaccaaagccaaccatatgcatcgcagtgtaatgactgtgtataaaatgagtgagctggaagagcagaagtatttaagatgctgtcaaaaccctatttttctgagatggagccttgctctgtggcctaggctggagtgcagaggcacgatcttggcccactgcagtatccacctcctgggttcaagtaattcacgtgcctcagcctcccgagtagctgggattacaagcacgtgccaccacacaaggctaatttttgtatttttagtagagacgggggtttcaccatgttgcccaggttggtctcaaactcctgacctcaagtgacctgcctgcctcccccaaagtgctggaattacaggtgtgagctatcacgcccagcccaaaaccctaattgttaaaccatgattgaagaaatggtctccttttaaaaattgtaacttttctgctgatacagagtaactaaaagtaaggacaccatccatatttaagattcagtcactgtggccgagtagtaggaccccttcccagcagtacttgccttcacacagacccaccagaggaacagttgcgggccccctgctgagggggttcaccatcaacatcatggctgccagcatcatggaggcagcatcatgaactgccgggagtctgataatccaggacccttcctgccttgtattaggaattgtcttccatcattcaaactcacagtacaaaaaatacagcaggaagtcttctgaaattaagatttgaaaagtcactgctatgccaggcacggtggctcacgcctgtaatttcagtacttcaggaggccaaggcaggtggatcacctgaggtcaggagttcgagaccagcctggccatcacggtgaaaccctgtctctactaaaaatacaaaaattagctgggcttggtggcagtcacctgtaatcccagctacttgacaggctgaggcaggagaatggcttgaacccaggaggtaaaggttgcagtgagccaagattgcaccactgcactccagcctgggttacagaacgagactcgtctccaaaaaaaaagtcactgctgccctagggattggcatgaagcaaaatgcagtctaggccgggcacggtggctgaaacctgtaaagcctgtaatcccaggaatttggttggctgagacaggtgaatcacctgaggtcttgaggtcaggaattcaagaccagcctggccaacatggcaaaaccccatctctactaaaattacgaaaattagccaggcatggtggcgtgtccctgaagtcccagctactcgggaggctgaggcatgagaatcacttgaacccaggaggcagaggctgcagtgagccgagattgcaccactgcgctccagcctgggtgaaagaacaagactctgtctcaaaaacaaaaacaaacaaagaaatgcagtctaagtccaaaaccacctgcttaatacatagctcagagatatttttagacttttagagttgagttgtattagaaatcagatcatctaagatggatttacctgtatgtgatcagcaaaagtaacatatactttgcagaacttttgcacacttgtactgcatgacttcctatccgtaagtatataaagctaagaagaaataaacagcttgagttatgcctgttaaactactctgcaaattttatcatggataaaaagagactgctgatggtaaaggcagttaagttcatttccatcattaaatgataatttttatagaaagtgatacttatgcaaaacaaaggaggtgatgggagtaaaacatttgagcatttggccaggaagaggggaacttacaccttccacgggaaagtattttaggaacataccgtcattttgggtgactgtgggaagaaaaagagtgagatgaagatagagaccatatcatgacaagacaaacttataagtggagattaagcatttacaaatttttatagcagactgacaagaattttatgtctgttgaatctaataataaaaatcagcttgtcttttggctgactttaaaatttcattgtaataatttattttcattgtgttttacaaaaaagtcagtaatcaattagaaatttaaaaataactggtccttcaacacagctaaggaaggaatgatttagaacagtaattctcaatggagaaagcttcaccccttaaggaagtggttttagaaatctgtggatcttttgggattaggaaaagagtcttttactaatatttgatagtcacagaccaggtatgtcacacatcctgaagtgtgcagtacagcttcacacaataaagagaggtggcctcatgtcctgcacagcctttgaaggtccttgatattcagatacaggggaaacccatttatctgaccctataacctgacaaaatatttattgctcagttttcatatatactgcatcttccaaaactgtatcatgtaaatcaagatactattatattttggtctgcttatcactagagaaaaccactaaactgagagcacacaactttgcattgcctgtatattattcctgtctcaacaccagtattggtccactgaggattattctacatatggtacaagcacttagctatttcattatgcctaaactctgatcatgcctaagtatttatgtactaaatttttttgtataaataatttttatgtctcctttctggtattactaggacattacattgatttttaaattatagatatatataagtggctatattttctgtgaatttcacttcaggattgtaattggaacattacataggaggaaattatagatctcaataaaaacactgatgaaattggtgctaaaagtcaaaaatgcgtaagtgaacttgcaggagatattagaagtcatccttatttccacgtttgagatgacagaagaatatacagtttagatacagtagcagctaaaaaaggaggttctgcctagtttaaatcctaattcagccaatggtagctgcaagaccttggcaagtttttccatttcccaattactttgttgtttttaaaaataagaatagcacaattcccttctatatctagggttggctctaagaatataacaagaagagaatccatctagagaggtacttggccaggcacggtgactcacgactgtaatcccaacactttgggaggtcaagggaggaggatcgcttaagctcaggagtttgagaccagcctgggcaatgtagcaagaccctgtttgtaaaacaaaaaaaaaaatttttttttttttaaattaatggggcacagcggtatgtgcctgtagtcctagctactcaggaggccaaggcaggaggattgcttgagcccaggaagagtttaaggctgcagtgagtcgtgatcgtgccacctgactccagcctgggtgacagagtcttgaaaaaatcaaatggaaaaaaaaaaaagaggttcgcatattgctctgctcataatcgacacaacccacatgtgtgatattaagttactctaaaacccaaaggcagagtactaaagagaaggaaatgagctaagaatatgagagtaggcataaaaatgagtgaaagatagacacatcaaatataggccttcttttaaaaagaaatctgaaatatcagtcattaccattagccagagtaagctaattaaacaatttcaatctttgtatatatacctggacacatgtgagagtctaggagtagtggacacaaaacaagaaaaaaaatccagcaagatgaacacagaaatctctatctgggttgatagtcaagctttgaaaagcatcatacaccctcaattcaaccaacacttaacttactgagcaccacctttgtctaccagattggaataaaaaactgaggaaaggtatttgtgaatatatacaatagacatctaggcaagatcgcagtaaattatagcctttctcatccccacatggaaagtaatactgaatagtaattactgaatagtaatattgtgttttgagtaagacaaagtaggccattcaggaaatcaaaatacggcaagtggggggtgggggtggggatggccttagtactgagaaaactcttgcttttctggttgctgataataaaattagacacagcattaatagtgccctgtcactcccaattggtttactgttctaaaaccctaccaggagacctttgccctccccagtcttaaccttgtatattttgttcattaaaactggaggtagaaagacaggaaaagagcaacaagtgaaggtttttatatacttaaatttaaaatgatgagcactgcatacacatctctagtgctgagtcacatggaaaaattgaacacgcatttcttttaagagggtaagtcctgttcagtctcaattcaaccaaaggttatctacaagaaaaaagcaaatcacttatgagtagttactctgttcttgagaaatgaaaaattcaaattcacctcttttgaaatttaaaaggcatcaaaaaacaatattcaaagaaacaacttaaactttagttccaggttctagatccagacaaatttcaataagcacacccaccttgtttctcccactgaaagcagttaaaaaatctagacagaaagtatcaaacaataatttgaagactcaaagtaaagataacagacagactaggaactctatagtactacagaaactgaagtgatttgcttctttttttccctctgctatgccccagcctagactcagcagcaaaaaactttcaagttgttagtggatacagacagatcttaggagaagccttgtagtttaggctggagaagcaagaaaggggaaccgggccgcacagcagaaggtgagaggaggtgagcaggcttaaatgcctgagccccgcctcctgtcagatcagcaatggcagcgttagattctcatggaagtgcgtaccctattgtgaactgcgcacgcgagggatctaggttgcatactccttatgagattctaaccaatgcctgatgatctgaggtagaacagtttctatcccgaaaccactccccttccccaaccatgaaaaaattgttttaatgcataaaaagagtttctgaactcttcaaccagggctgtatggatttcctgagaacaaacaagtccatcttggtgaaagaattcgccttcactgatgtgaaactaaaggttgagcaagtttgcttctggagaagaatgctgtggacaggcttacacatgatgatggagcaatggaaatattaatgctgggtgattaacacagactctacaaccggtgagttctcttcagaacctctggacgactgttgcaaagaaataaaagccatgatcaaaattttctgattaaaaaaaaaaaaaaagaaagaaaaattgtcttctacgaaaccagtccctggtgccaaaaaggttggggatcactgatctaaaacactgatggagggaagaagctatagttccaaggggatggattgaacctgtttgcttcttttccgtctgtttgcctctcgttagccctggacatgtatacagttacaggaagtgcacaaccacgcaaggtatctaaggtccttgcttttctgattggagaatcaaaaagggaagcctcagggaaacaaaatactaatcaaattgtgtccggaattggtttcttccagtgggttctcggtctcgctgacttcaagaatgaagccgtggactcccacggtgagtgttacagttcttaaagatggtgtgtctggagtttgttccttcagatgttcagatgtgtccagagtttcttccttccagtgggttcgtggtcttgctgacttcaggagtgaagccgcagacctttgcagtgagtgttacagctcttaaaggtagtgtggacccaaagagtgagcagcagcaagatttactgtgaagagcaaaagaacaaagcttccacagtgtggaaggggaccctggcgggttgccactgctggctcaggtggccaacttttattcccttatttggccccacccacatcctgctgattggtccattttacagagtgctgattggtccatttacaaacccttagctagacacagagcactgattggtgcgtttttatagagtgctgattggtgtgtttacaaacctttagctagaaactgagtgctgactggtgtgtttacaatcctttagctagacagaaaagttcttcaagtccccacctgacccagaagcccagccaccttcacctctcaaaatcatggagacagagaagctcattcagcttcaacatcatgaagttattagaaatcaataaaacagataaagctctgcaaggctgatgaagattttaagagagagaacacaaaaattactagtatcagaattaaaaagtggagatatcactagagaccccacagacattaaaggataagcgaatactacaaagctttatgcaacttgtccatgatgatgtagttattaaaaaaaaaaaaaaagaaaaaaagaaacaacttggatgaaattgaccaattctttgaacactacaaacgacccaagatgaaataacctgaagaacactataattactgaagatattgaatttgagcataagaaaaaaaaaaaaagggctgggtgtggtggttcatgcctgtaatcccagcactttgggaggccgaggcaaatggatcacctcaggttgggagttcgagaccagcctgactaacatggagaaaccccatctctactaaaaatgcaaaaattagctgggcatggtggcgcatgtctgtaatcccagctacctgggaggccgaggcaggagaatcacttgaaccaggaggcagaggttgtggtgagccaagattgggccatcgcactccggcctgggcaacaaaagcaaaactctgtctccaaaaaaaaaaaaaaaaaaacttctgagagaaattattcaagtggtttcacaggtgaattctatcaaatacttaaagaaataacaccaattcagcaaatcacttccagaaaaggtaaacatgttttcccaacacattttaaggctgtgttaccctgataacaaaatcaatggcaatacaaaaaacatcaaactacagaccaatatccttcatgagcagagacacagtaagtcctcaacaaaaatgttagcaaattaaaccaagcaaaaagaataaaataccacaataaagtggagtttatcataggaatgcagggttggttcaacatttgtggggggcagggggcggggggcggggggggggggagtcaatgtaattcatttacagcctaaaaactacatgataatatcaattcatgcagaaaaagcatttgaaacaatccaacattcactcatcatatagattgtcaacaaactagaaacagaaggcaatgtcttcaacctgataaagagtatctacaaaaaacccacagctaacattttatgtgatgatgaaagacaatgttttctcacaaaaattgaggaagggtaaggatgtcaactctcattggaggtcctagacagtacattacagcaataaaagaaaaggcatacagactataaaggaataaaactatgcccatttgaatacataattgtctaagtagaaaatcccaagcaatctattaaaaaataaaaaacaaactttcagaactagtaagtttagcaatgtcaaaggatataaggtcaacacacaaaaatttaaaatacttctacatactaaaaacaagtggaagtccaaacttaaaaaataatattcacctactatttagaaaaaaaaacaaaacaaaataacaagtgttgaagtggacatggagaagttagaacacacttgggcactgttggtagaaatgtaaaacagtacagctgctatggaaaacagtaatggcaattcctgaaataattaaaaacataattgctataacatctttttcactggtttattcaaggagaggaaaagaagaactgctataacatccagcaatcccacttctaggtacatacccaaaagaattgaaagcagagtctcaaagagatatttattcacctacattcacggtggcattgatcacaatagccaaaaggtagaagcaatccatatgcccatggacagaagaataaacaaaaggtagaatacacagacagaggaatactacacttaactttcaaaagaaaattctgacacatactacgacagcggtccccaactattttcgcaccagggactggtttcatggaagacaatttttccacggacagagagtggggatgggggggatggcttcaggatgaaactgttccacctcagatcatcaggcattagattctcctaaggagtgagcaacctagatccctcaacgtgtgcagttcacaatagggtatgcattcctatgagaatctaatgctgtcactgatctgtcaggaggtgaagcttaggcagtaatgctcgctcacttgccactcacctcctgtggtacagcccagttcctaacaggccacagatggtaccagtctgaggcctgggggttagggacccctgtgctacaacatggttgaacagcatactaagtgaaataagccagtcataaaaagacaacttagtaaagttgataattattccaaaagggtttttttgttgttaacttattgcaatcccaataaacatcccagcagaatttttgtgtatagacttgctggttccaaaatacacgtggaaaagcaaagtaaagacaatagccacaattctgaaaaacaataaagttgaaggaataatactattcaattttaagacttataaagataccgtaaccaagaaagtgtagtagcaaagggacagacacataaatcaatgggataaaagagtccagaaacagacccacacaaatatggtcaattgatttgtaacaaaagtgtgagggcaattcaatggaaaaggaacaatattttcaatttttggtgttagaatgagacatttacatgcaaaaaataaaaccacagcctgtgaagcatacattacataaaaattaactcaaaatgcaccataggcttaagacaataggagaaaaccttcataactttgatttaggcaaaaagtttttagacaggacaccaaaaatactattcataaaatgagattggcacaaatgaatacactgaacttcattaaaatttaaaacttttggccaggtgcgatggctcaagcctctaatcccagcactttgggaggccaagatgggttgatcacctgaggtcaggagtttgagactagcctggccaacatggtgaaaccccatctctaccaaaaatacaaaaattagccaggcatgttggtgggcgcctgtaatcccagctactcaggaggctgagacacgagaatcgcttgaacccaggaggcagaggttgcagtgagccgagatcgcaccattgcactccagcctgggtgacagagcgacactccatcttaaaattttttttaaaaataaagatacaaaagaaaaaaaaatagccaggtgtggtggtatgcacctgtagtcccagctactggggaggctgagatgggagaatcacctgagcccaggaagtcaaggctgcagtgagctgtgattgtgccactgcactccagcctgggcgataggagtcaagattctgtctcaatcaactgataaagggcatgatgacctttaagatgatcatatccagaaaaatgacagaagcacaggacaaaagtccaggcagcatagcacaaaggacatggggtaaacatggagggagcagggtggggtcagaaatgcttgcctcatacaccattcatatataccggttgtagagaactctggtattccccttgcacacccatcaccagattacctctagtgatgtaaagtctggcccatcccagagcagccatgcatgaagaactctatgtctacagttctttaaacagagaactttactaataacttccccaatgaaattcattcatcactcataaccatacattacgtccagacctggggaggatccagtttctattggcttcactgtcaagcttttcagaggcatgttgaaaccaaatcataataactagaagaaacaggaacaaccctttgggaggaagttttctgttagagcaacctgattaagaggagacactaacactttccagctgcatgatcccagacaagctacttcacctctctgtaccaccactgccttatctgtaaagtggggacatgggactgctgtgaagattaaaacgtgttaattcagtacccggcacataagtgcctagtacgtgtcagctacttattggccgagtggcctgctcaaagtcaggccactgagaagaagaaaggcacctaccgagaacatgcagtttatctgctatttatttagaactccaagctgtctgctataaaggcaacctttaaactggttatttctaatatttaacatctctgactcccattactacttctcgctcagctcatggacagtctcaacgtcactgtttctacagatgttttcttctgttgagttaaagcacctcatggtgttagctttatgttgccaattacacctaaaatgcttctcagccaggcacagtgactcatgcctgtaatcccagcactttgggaggccaaagtgggtggatcacctgaggtcagtagtttgagaccagcctggtcaacatggtgaaaccccgtctctactaaaaatacaaaaattatccgggcgtggtggcacacacctgtaatcccagctactcaggaggctgaggcggagaatggcttgaacccaggaggtggacactgtagtgagcagagatcacgccactgcactccagcctgggcaacaagtgtgaaatgctgtctcaaaaagtaagtaaataaaatgcttctcaaatttctatttgacattaattcctgtatccacatggaccaagtagcacctaacacagcatcaaaaacaatcagcagttggacagaagatgaatgacagttcctgcctttaaagatgccaacatccagcagggatgtcacctaactcactccgtggtccctgcctactctcttccccaggaagtcatctacctccccacaaacctcaagacagctttccacttctcagcacacgttcatccacggcttacagtggggtctctctgagctattttatattaactatggtattgtttcgtttttcctccagactagataacatggcatcactacttttccatttacttatttcttcactactttcccacttatttctcttttttttttttttttttttttcagtagagtctcgcctgccgcccaggagtacagtggcacaatttcagctcactgcaacctctgcatcctaggctcaagcaatttttgtgcctcagcctcctgagtagctaagattacaggcatgcgctaccatgcctggctaatttttgtatttatagtagagattgggttttgccatgttggccaggctggtctcaaactcctggcctcaagtgatttgcctgcctcagcctcccaaagtgctgggattacaggcctgagccaccataccaggcctacttgtttcttctaaataaggaatacttggtttcccttctttgaccagagcctcacttaatactcatcttcccagatcaattaagtccaggaaaaaaatcaaatatgcaagtgttgaagtaaaaccaagaaacgttctgaattttctagcaagactgtgatttttaagtatgtattccccataagtacctgtcagatcacgtattcaaatctttgctcggaaaacagtcattccagtcatgagtgatgtgggggccccaccagcatggagaacctggtgcataggctgtttccccacacagtaaacacagggaaatattgtttcaccttcctcatcagcccccaaaatgacaaccttccttgccctttcctctaggaccacttcatttacctaatgtcttcctttacataaggtcttatgcttcacttcagggaaggtacccccagctttgggcattttttgagtacttattaggagttttgattcttttgactggagagtagtttcaaggaaataacattaggagaaactgagaaatcctttccttaagactctggcctttttttttttttttttttttttttttttttttttgagacagagtcttgctttgtcacccaggctggagtgcagtggtgcgatcttggctcactgcaacctccgcctcccgggttcaagaggttcccctgactcaacctcctgagtagctgggattacaagcctgtgccaccacacccggctaatttctgtatttttagttaagatggggtttctccatgttggccaggctggtctcgatctcctgacctcaagtgacccacctgccttggcctcccaaagtgctgggattacaggcgtgagtcaccgcaactggccccacttactgtgtattttttacatacaaaaagacattcctgccgggcgcagtggctcccgcctgtaatcccagcactttgggaggctgagatgtacagatcacttgaggtcaggagttcgagaccagcctggtcaacatggtgtagccctgtctctactaaaaatacaaaactcagccgggtgtggtggcaggcacctgtaatcccagctactcaggaggctgaggcaggagaattgcttgaacccaggaggcggaggttgcagtgagccgaggtcgtcgcatcactgcactccagcctcgatgaaagagcaagactccgtctcaaaaacaaaacaacaacaaaaagacattccttaaatttagaaaatggagcccacttgagaaattgagtaggcaaaagaaaaaatatctaaaggtgtttaatgtcaagtactccactaaggctttctcccaaagccctacccttatccatttaaggaagggctctcaaatcctccttctaatgtacacttcccctgtggcatctgaacatccacatcgttgtctgctgggactgtttctgtggaggaatccttccagtctggtcacactgagtctactcttcaggtacctcaggcaaaacaggatggatgagaaaccaccattttcccttatttctttgctatattccatatatttgggagaaaacaaacctacctaattctctagcagtgagtccttcagaaagttagtctgtaatcccagcactgtgggaggccaaggcgggcagatcacaaggtcaagagattgaaaccatcccggctaacaatgaaaccccgtctctactaaaaatacaaaaaattagctgggcatggtggcgcgcacctgtagtcccagccactcaggaggctgaagcaggagaatcacttgaacccaggaggcagaggctgcagtgagccgagattgtgccactgcactccaacctgggtgacagagcaagactctgtctccaaaaaaaaaaaaaagttagtctcccagtatcttcatctgccataaacatttagcagaatccagtgcccacccataagtgctttatcatcatctaaaactaagtggttagaaactgtttaaagctgcttgacacagcatgtaagatatgcggtccagagaacttgaggaatccccttctgatcatttagtagtatatggtggaatacagataacataaataataaagatctaacagtaacagaaaggtaacactccaggtacagatcttacaaaacaccaaacgtcacaagcgtttctgctgtggtcccagattctgttacctcttcagtgacttcacagaatctggcttacaagatgactcctagaattggggcaggagattgtcttacttcaaggttagaggtttgccttgatattaagctctcagttccatcagactgacagggtatatgaggcattagggcaaacaaagaaaaataagctctcagttccaaatgtacttctcagctttgtgatgccaggtctaggactatggactctaatctctcctttgccagctgttacctgttagtttctgccaatagaaggcaccagaggggtactagaaagcaggagtcgggatagagatgacatgctcttgcccgtctgtcagtcggcatccccacacccacaggtcccgtccatcagtcgacatcagcaggccctgtccgtcagtcggcatccccacatccgcaggtccctgtccatcagtcggcatcaccacatctgcaagtccctctccgtcagtcagcatcactgcatccataggtccccatccgtcagtcagcatcactgcatctgcaggtcccgtccttcagttggtatcaccgcatcaccaggtcccatccgtcagtcagcatcaccccacccgcaggtccccatctgtcagtcggctttaccacattagcaggtcccgtccgtcagtcggcttcactgcattaccaggtcctgtctgtcagtcagcttcaccacatcagcaggtcccgtccgtcagtcggcttcactgcaacaccaggtcccgtccgtcagtcggcatcaacgcatcaccaggtccctacccatcagtcggcatcaccgcatcaccaagtccctgtacgtcagtcagcatcaccacatccgcaggtccccgttcatcggcttcaccgcatccgcaggtcccgtccatcagtcggcatcaccgcatcgccaggtccccctccatcagtcggcatcaccgcatccgcaggtccccctccgtcagccggcatcaccgcatccgcaggtccccctccgtcagtcggcatcaccgcatccgcaggtccccctccgtcagtcggcatcactgcatccgcaggtcccgtccgtcagtcggcatcaccgcatccgcaggtccctgtctgtcagccggcgtcactgaatcagcagttggttacagcctctagctcctctggacactctgaacaagatgtataactcctctctcctccccacatcccaggcgccagccatagccaaggagctcccatggctcagaaatctaagtctcaggtgctcagggctcttccctccaagtctctaggatccaaaacctcaacttcctctttggccttccaaccctcaggccgtggctgctccttacagtcactactctggattctctttgttctttcgcctttcagcacctgtgtgattctccctggtgaaataccgagtatgttatctgtgctcctgcctggatctcactgagacaagcacaaaacctaaggctgagagctggtgaatttgttgttcttattatatcatagctaaaacatattgtgtacttatatgtaccaagcactgttttaaaggctttatcatgcataatcctatttaatgctcaaagcaacccaatgagggggccaccatcatcacccctggttagaaaagaggaaaatgaggctcaaagaattttaaaaacctgttcagagatcccataactagatcacacaatgagaaagtagtggagctaggacataattccaagtctgacctcaaggctgccccatttcctgcaaaaaaaataaaaataaataaataaaatacaactataaggcttttttaggtgctccaagctgcttcacagggctatttacattgctcacagagaacttactatagtgcttttttgttatcctcttgagtcttactctgtaacaggccccttccttttttcatcccactgctcctctagcaaaacaggatgtcctgtggaatatcccatatttaggacatggctagttgtttctttgatgcatcatttaatttgtcactctatcttctgtatttcttgtaaactcaaagttagattaagactgaagccagttgaacctattgagataagactatttcctctgtggtgacatgtatattctactgcattaaagtagaaggtacataaggtccggtcattccactttcagtgattctaagattaatcagggactcaatgcctaatcttccattataaaaattgtccagaactgcaaaattatcgctgtttatgataaggctttggcacaaaacaagcggcatacccagcgtgaataaataaaatatatacaggctgggtgcagtggctcacgcctgtaatcccagcactttgggagaccaaggctggtggatcgcctgaggtcaggagtttgagactagcctaaccaacgtggtaaaatcccatctctactaaaaatacaaaaaattagccaggcgtggttggcggatgcctgtaatcccaactactagtgaggctgaggcaggagaatcatttgaacctgggaggcggaggttgcagtcagccaagattgcaccattccactccagcctgggcaatgagagcgaaactccatctcaaaaaacaaacaaacaaacaaacaaaaacatacaaagtgacccttctcaaaaaggaaatagtgttccctcaagcctttaaggaaagaaacacctaacagcagcagcccatcttattcctaacgaactctcaataaaattgtttttgttgatcaatatgtaaataatcattaaatttttaaagggagtcaaaggtgaagaattccaaagtctagttccaagcatcttacgattcagtatgtgctcttgcttaattaactttatcttgcgtgcccatatttgcccatttgaaaacagagataatccactaacttgacactacctcaaaggacaatgaggagagtaaagtgaaatacaaaaattaagaaaagttagatacggcaaatacccagaataagggaaaatgcaataaactaaaagctaaattctctaaatttgaagagattatgaatgaattaaaaggaaactctgcccatagcagatatgctagtactctaataatttacttaaacttggtttctaccatttggctgtttcatagaaagctacatcataccagatgtagctcctgaacaaaaaaaatcatattaaattacattttaaatcatatttaatatggctcatcttaaaataaggggattgaactagtaatcttgctattacaacacttgaggacctatcccacaagctactgaattccctaaataaatgttaatctaaaacaggaacatgtaaaaagtttaatcttataacccaccgtttccatctataaagtatatttttagtgcattatataacttgcaatatattcagcatataccaaaaaccaaccccttcctgcaaagcttaatctcaataatactgttctgaagataaatattctcagcacaaatcacctgtgaccaactgagaaaccttggagaatcagacttagatcaacttcccaccaaactaaccttttaaccaaactttgcattttgatgggggttatgatttagtgactcatcaaatgtcattttagaagactagtctaaaacacacaaaactagttagtcttgattttttttatattagagatacataaaagctaagcagtttctctgcaccaccctctccaaggtgggttttaagaactttcaggttccattgtctgaagagtcaaaagacattttcttttatcccttcaactactggtgtctcagattctcaccatgacatcattattatgctttggaaactgctgacacaggctattcaattgtgctaaatagtttgtgtttatgcatattacacaatcagtgcagtgccaccatctgagcaaaaggaagcagaataacattttaaagtaacagcacaaaatagcaggtatttgtctttttaaaactttgccaagataggaacttcatatttaaatacaattggcaaactcatcagaaagaactgaaatcaacaaaatcctgttgggaagtgactgaatgagaaagattacccagttacccaagaatatatttcaatatttggtttcttatcccaaagagcagatttttaaaagatacactgtgcccttactaagaaaaacccacaccaaggcacgggtcataggagaagaattttatgttctagcacacccaagagttgaggaaaggagaaaaagctttgaaaaaactaacagcaataggcttccatacttagatcttaattttaaatacagaaattcttacctcccactgtaaatgaggcgggatatttcgtatctgaagtttccgaatcctgcagaagaattaaaatgttttttaaaagaaaaaaacataaaagcaaaacaataatagccaacatggaagtttagaaactacttaaaatattaactctatattaattacaaaccaatatctattaagaaaatacagcccaagaaggaaaagcaaagaagcaaagtcataaaatgcatagagaccatttggagatccagcatttatcggactgttatgacttattttaaaagccactaaaattggcagatagaatgtttaaaacacacttatctgatgactacattctaagttcaaatccgttagcttcaaattaggcatcccaggacacaaacaaggccttagtccaggtgaccttactctgaccgttacagctaaggagtccatggataaaattcagggaaataaaaatgaggtgtgggtggcaggaaattacacatttatcttcactatcccctaaatgaaatttaacacgtccttcaattatgaatgctggcactaaaccacagaattacagtacttgtaattttgacatcaatataaatcagatattttcataccacattagactgttggagatctttatcatctatactcattactgtgaaacttagatgtgttgctagaacttgttgcttattatactaagcacctatcaccaagttttaacattctgctaactacattttaaaataattggtttcctttataatcctacgtattttatgcattttaaaacatcctgaggccaggcacagtggctcaggcctataatcccaacactttgggtggccaaggcaggtggatcacttgaggtctggaggtcaggaccagactggccaacatggtgaaactcctcctctactaaaattacaaaaaattagctgggcatggtggcaggtgcctgtagtcccagctactccagatgctgaggcagaagaatcacttgaacctgggaggcggaggttgcggtaagccaagattgcatcacggcactgcagcctgggcgacagagcgagactccatctcaaaaaaataaaaaataagacatactgaaacataagaagagatccataggtttcagactgctaaaggagtgcacagtacagaaaatgttaagaatcagcaccttagtccaaatgcctccctacacatgtatatatgtatgtataagggaaggaagagggcgacacatataacacaactgcatgttaactgtatgagactataccatagaagtcacatgccagtcacctcctttgaaggaggaagaatttatagtcaactagctattaaaaacaaaacaaaaactagcaattgagcttgacatctcaagtgaaataaattacttaactttcacaattagaactataggacaggccttgtggcttatgcctgtaatcccagcactttaggaggatcacctgagcccaggagttccagaccagcctggacaacatagccaaaccccatctctacaaaaatctttttaaaatttttttaaactagctgggcatggtgttgcatgcttgtagtaccacctactcaggagactgagatggaaggattgcttgagaccaggagttcaaagctacagtgagctgtgactgcaccactgcaatccagcctgggcaacagagtgacaacctgtctcaaaaagaaaagagaagaaaaaagaaaaataaaaaacagaaaaaaaacaaagaactatagtgaacttctctttccaggtcaaataatccacaattttgaagtatctgaggaaaacaccagtttagtctagattcataacctagtttagtcctttgcctcttccctttccccaaaagggtgagaacaaacaaataccacagctgccattgatcccttcgagaacaacaaagaaaacctagattaactaaactcaggtacatcctgtctacaatcataaaatggaggagggaaggaagagaagcacttttacattattttcatgacaaagtaaaagcacagtcatcaaggtaaaatataccaaagaaataaaagagaatgccagtttaagagattcaaaaatccaaactatagctagtacaagtttacagactaaatgctagtttgggatttgtttcaaaataactcatgtggtaataactgttaaagcttcaggacaggtacctctctgcttttatgtaagttttatattttctttttcttttgtgtgtgtgtgacaagagtctcgctctgtcgcctatgctggaactcagtggcacaatctcagctcactgcagcctctgcctcccgggttcaggcaattctcccacctcagcctcctgcgtagctgggattgcaggcatgcgccatcacacccagctaattattgtatttttagtagagacggggtttcaccatgtcgaccaggctggtctcaaactcctgacctcaagtgatccgcctgcctcggcctcccagagtgctgggattacaggcatgagccactgtgcctggcagtattttctataaaaggtttaaaaaatataccctaataaaaagatttataattcatagatttcacaactgttatatgttgcttcaattaaaagaaagttgcggccggacacagtggctcacacctgtgatcccggcactttgggaggctgaggtgggcggatcacctgaggtcagaagttcgagaccagcctgaccaacatggagaaaccccatctctactaaaaatacaaaattagctgggcatggtggcacatgcctgtaatcccggctactcgggaggctgaggcaggagaattgcttgacctgggaggcagagtttgtggtgagccaagattgcgccactgcactctaccctgggtgacagagcgagactccatctcaaaaaaaaaaaaaaaaaggtgctcacactgtatttacctgactaatgaaggtatgatttactacatatatgcaagtactaatctggttttttgtttgtttttgttctgttttgagatggagtctcactctgtcgcccaggctggagtgcagtggcgtggtcttagctcactgcaacctccgcctcccgggctcaagggattctcctgcctcttcctccggagtagctgggactacagatgcatgccaccacatccagctagtttttttatagagatggtggtcttgctatgttgtccaggttcatcttgaactcctgggctcaagcagtccttctatcttgacctccccaaagtgctgggattacaggtgtgagccaccatgcctggccctattctgttttaatcaagtatctaacacagtaaggattagcagcagagttaagaaactaagtattcacacctacactggcctcattttggagggtgtatatattaccaaaaaattttcccaaaagtacacatgtaaatatacatagagagttcaggttaattagcatgtgatcatacatattacaaaaataaatatccacttcacaaagaggatactatcttttgtttattaagagtaatccaggcaatacacagtggctcatgcctgtaatcccagccttttggggggccaaggtgggaggagtgcttaaggccaggagtaaaattagcgtggtgtggtggcacacgcccgtagtcctagatactcaggatgctgaggtgggagaatcacatgagcccaggagtttaaagtttcaatgagctataatcatgccactgtactccagcctgggcaagggattgcgaccctgtctcacacacgcacacaaagcaatccatttgccatgttttcccaaagactttttaagaatctcatactcaaggatcccacggattttctacccactcttcaaaatttacatccaacacccatttaattattggaagtttggatgttactccagaataattatttcccttaaatggttttctcgtttcccttacctgatactcttaagtttcattttagacaaacatctgagttatttttatgcagtgttgtgctttgtttttcagatgggagtctcgctctctcacccaggctggagtatagtagcgtaatctcggctcactgcaacctctgcctcccaggttcaagcaattctcctgcctcagccttcctagtaggtgggattattagatgcccactaactttagtaaagatagagtttcaccacgttggccaggctggtctcaaatacccgatctcaagtgatctgcccgcctcagcctcccgaagtgctgggattgcaggcgtgagccgctgcgcccagccctgcagttagcgtttgatatctagaattgttctttcccatttgctcagtaactaatcttaaactgtgtgacgtttacctctggctcctaaccccgtgctctgctcttatcagtacaagagccaaaagtctcaacattaacaagaatgaaccaaaggcatgaattataatcatccagcacagataaatacaaacttctggcatggaaagaactggagaaaaatctatctcagtcagctacacaattaaaatactctactgcttctttggtcatgttccatctgagatttgagaatgagtttatatttgggtttgattctaaatacttacaagtcaagaaaaggtattcatattttaatagagtgtttctatcatattaattaccaagtcattaaagttcaatataactatcagaaaataaattagcatttcaccatctcctaaaacatacataaatacataggatgcacactccataacaacagggactaattaggttatcttgtttgttgctgcattcagagcctgaacagtgcttggcatctgataagcattcaattgatagttaaaatgttacactatatggtggagggggggaaagactcacagaaccactatccagaaactaacatttcaaatgatttccttatagcttataaagggaccgagaaaaacaactgccacacatttttgagaatggaaaaaaaaaacaaaaaccccaaaatattgaattatttaagcatttgcattaattttaaaaattcaggccaggcacagtggcttaagcctgtaatcccagcactttgggaggccgaggcaggcagatcacgaggtcagaagttcgagaccagcctgatcaacatggtgaaacctcgtctctactaaaaacataaaaattagctgggcatggtggtatgcgcctgcaatcccagctactcaggaggctgaggcagcagaattgcttgaacccgggagacggaggttgcagttagccaagactgcaccactgcactccagcctaggcgacagagtgagactccatctcaaacaaaaaaatttttttttcaacacagtttaagggttccccaccagaggggaaatacggtaaattttagttctcaggctaatagattaaaaatttaaaggccaggcgcagtggctcaagcctgtaatcccagcactttgggaggctgaggtcgggggaatcattaggtcaggagttcaagaccagcttggccaagatggtgaaaccccgtctctactaaaaatacaaaaattagctgggcgtagtggcaggcacctgtaatctcagctactcgggaggctgaggcaggagaatcgcctgaaccaggaggcggacattgcagtgagccgagatcgcaccactgcactctagcctgggcgacaaagcaagactccatctcaaaaaataaaaataaacaatttaaaaactgcccactctgctagaaatattagttactatgaaaattcaatcattatttattaaaagcatgtttaatcacaaaagaaagagtcaatgataggcccggcagggtagctcatgcctgtaaacccagcactttgggagaactgcctgaaaccaggagttccagacaaccctgggcaacaaaatgagaccccccacaccggccctgcctatctacaaaaaaatcaaaattaaaattaatttttaagagccaatagagcagctcatgtagactctgaagggcatcttcaagatgtttagtaatcgatgaaactgatttaagttgattttatagaaatgttcaaattgtcaccaattagagaaagtgagcctccaaatacccatcacctgtttcaattaacgagtatgataatctgatcttgtttattctatacccacacctgtaccaagtcccccttacgtagcatgccatgctgaactactccagtaaacaacaatgaaaaataaggagctttatttcaacataaccacaacagcattactgctcctagaagtgattagcaaaaattcctcattattagatatccactaagtgtttatttccaattgctaataactatctttttacatgaggtttgttcgtatcaagatgccaacaagatatacatatgcatacagttgatatgctgatatataatcttaggtctatttaatacaagagtttcccctcactgttttcttcacatttatgtagtggtccaaagtcataaaatactacatgattactcattctggattttactcactgcaaccccctttgtatcattttaataattgtttactacatagaattagatatataataatgtattttttctaagagataggatcttgctctattgcccagactggagagcagtggtacaatcacctcactgcagactcaaacctctgggactcaagtgatcctaccatcacagccttctgagtagctgggaccacaggcatatgctaccatgcccagctaaattttttgtagagatggggtctcactacattccccaggctggtctggaactcctggcctcaagcaatcctcctgccttggcctcaataatgtataatttgtttatatatataagacatctatgaacccacctccaataattagaagataattgaagataattgcatgcttctcccccaaccctcctcctcccagaatataattatcacccctaattttttattctcatgctttgatttacaacagttatctgctaaaactgacttttttagcctggcatagtggtgcatgcttgtagtcccagctactcgggaggctgaggcaggaggatcaactgagccctagggaggtcgaggctgcagtgagtggtggtggtaccactgcactccagcctgggcaacagggtgagatcctatctcaaaaaaaacaaacaaaaaaaccctgacttttaaaaagtagacaaaatggtgccagcagtccttaaaaatgaccaaaattgtctgggtgcagtggctcgcgcctgtaatcccagcattttcagaggccaaggcaggcagatcacctgaggtcaggagtttgagaccagcctggccaacatcgtgaaaacccatctgtactgaaaatacaaaaattagccaggcatggtggcacaggcctgtaatcccagctaattgggaggctgaggcaggagaatcgcttgaactcagaggctgcagcaagctgagaccgtgccattgcactccagcctgggcagtaagagcaaaattctgtctcaaaaaaaaaaaaaaaaaaaaggggggtggggccaaaattgccagaaatggttggggggaaaaaatttaatgagcaaaacttaatactatctagtcagtactcaaattttcctgattaaaaaatatctttcttaacaactggtatgttcaaatcagtattcagataagatccatatgtggcatttgcttatgactctagtcttataacctaaatgttaccctttttcttgcaacttatttggataaaaaaccaaaaacctaaaatgctgtcatttgtctttgagtttctcactacctggagtttgctagtgacactcctgtaatagtgtttaatacattcctctgttccctataaagttgtagttagatccaaaggctcaacttggtttctcttgtttcatatttgagagaggcaatattccatagggagtgttctgtacttccatgggagttgttacctctgatatctttctatgatgttggcagctactagtgatcactgcctaaacccactatttcattcaaggttgaaaaccatgattttctcattctatcatgccttctgtgttttttagccagagttattccataaagaacaagtgtccctcatcaaatatttggatgctctgaagcatactaagtatagtaaagacaggataaatactttattctttcccttctgcagcagatggttttgtgctccttatcacatcacctgactcatcgctgtggtggacaatcaatcccacacacatttcagttgtctcgcttctttccacccaaaagcacacaccttacacaaggctgcttctttatctcagggctttctccaaagtctctagagtacaggagcagcccagaaacactggacagacaaaatccttaagaagaacttgcataaatataggtgtatgagggtgcgggcaggaagctccaatttttcagatagataaacctgggaggcattccgtgaatttcttggaggtcccgtttccctataggaaactcaataaagtatctatcattggcttttcctcactccccaattcattcttccccttccctcacttcttcttgaaatcatctccaaaataaaccaactttggcaaatccctgtttcaatctctgctttaagaggagtccaggctgggcacagtggctcacatctgtaatcccagcactttgggagaccaaggtggaaggatcgcttgatgccagggcaatatagcgagacctcgtctctacaaaaaaattaaaaactaaaaaattttgctgggtgtgatggctcacgcctgtaatcccagcactttggaaggcggaggtgggtggatcacctgaggtccagagttcaagaacagcctggccaacatggtgaaaccccatctctactaaaaatagaaaaattaggccaggcacagtggctcacgcctgtaatcccagcacttcaggaggctgaggagggtggctcacgaggtcaggagttcaagaccagcctggccaagatggtgaaatcccatctctactaaaaatataaaaaattagctgggcatggtggccggcatctgtaatcccagctactcaggaggctgaggcagagaattgcttgaacccaggaggcggaggttgtagtgagctgagatcgcaccactgcactccagcctgggtgacagggcgagacaccatctcaaaaaaaataaaataaaataattaaccgggtgtggtggcacgcacctgtaatcccagctacttaggaggctgaagcaggaggatcacttgaacccaggaggtggaggctgcagtgagccaagatcatgccactgcactcccgccttaagagacagagtgagactccatctcaaaaaacaaaaaaagccagaagcaatggctcatgcctgtaatcccagcactttgggaggccaaggcaggcagatcacgaggtcaggagattgagaacatcctggctaacacggtgaaaccccatctctactaaaaagtacaaaaaattagccgagcatggtggcatgcgcctataatcccagctactcaggaggctgaggcaggagaatcgcttgaactcgggaggcggaggttgtagtgagctgagatcgcaccactgcactccagcctgggcgacagagagagactccgtctcaaaaaaagaaaaaaatattattggcttctctttgatgctgtataaaagaaaaaaaaaatatatatatataatatatatttttaaaaattaatgggtatggtggtacatacttgtagtcccagctacttgggaggctgaggtgggaaaaccgcttgggcccacgaagttgagaggctacagtaagctatgactatgctactgcactccagcctcagcaacagagcaagcctctttttctttttttcttttttttagggggaaaaaaaaaaaaaggagtccaaagatattatttcaaatttttcagaataacatgttagggacctgacattgcccaaagacaatcaaatatttcattccttcagtatcattattaattcagagtcatacatattttgcttgtatcaatcttttttgatgctcaaattgtcccatctttggccagcaaaacggcttcttcatgttagctccttcatcttttgatgtgactccaataatatttgtgagcatttctgctttctgttatgacgtgatattctaggtttagcttgtatgtttcttgcccccatctataatcagccttatcagcatggatccttgatcccttttagtcagaaaaagtacagagagactacaatctggtcactagaggcactcattagattggttattgcttccaagccagagctagaaaatacacttggaaagaaaataaaccatgggttcatactgattatttccaactcagattttggatgactggaatttcacagaaagtctcttatatttgcatattttcttccactaaaaaatctgacaaaagatagaaataagaacccaaaaaagtgctttatgtttattttctcatttaaccctcagagttggcattttacagattaggaaacaaaggcagaagtaatttaatttgtctgaatacacacacagctactgtgtggcagggtcagcatatgtatttgagcattctggccacagattctatcctcctaaccatactctagtcggtcttactgatttcacttataatccaaccaacagcataaccataccaaataacttcacaaaaaagtatagattgcacatgaaattcaaaagataaaaatatatgctaatcctaagcaatattttccctttacaccttagctttaaaccacaataacttacatatggcgactcaatattgaaattaagtggacaagcttacatattaataccaagaaagaaggaagagaggaaaggcaactatgaggaaaacacaactactcagttgtctcaagcattacaaagattatatacataggcacctcaggtacttctgaagctagtcatatcaagtcaagtcccaatgcaagacacaaaactgtattagacctgcaacctttcatccaaattacctgtaagtcctggatgcacctttaacttattcctctggaaaaggctctgtctcagccccttccttctaccaatgcttacatacaaatcaagtgggaatcactgcttccctgctttataagacagatactgacataatgctgctaacaccagctgatgacagaaggagaaaaccaagtctaacttgtaacatgttcttctttgcctctttttttttttttttttgagatggaatctcgctgtcacccaggctggagtgcagtggcacgatctcggctcactgcaacctccacctcccgggttcaagcgattctcctgcctcagcttcctcagtagctgggattacaggcgcgcgccaccatgcccagttaattttttgtatttttagtagagacggggtttcaccatgctggccaggctggtctcgaactcctgacctcgtgatccgcccgcctcggcgggattacaggcaggagccaccgcgcccagctgccttatttcttatgcaaaaaaactggaacacaaggttcggatttggactggtattttcaagtaaaaagccaagccttatggctcaaagcagtctagcatgggctttccaacccgccacttggtggcactctgtaccggctgcaaattttcattccagctgtgccgaactaaacctatgtccaaagaggacttcattcagcctggctaatttcaatatggctatactgtaattacacctattctttcttggtttatacagttaagaatcagctctttaaaaggtcaacctcaattttcaagaagtttaatactgtactccaagcaaatacttgggaaaatgatcagtcttacattcctggtctatatgtcaactggcataactctgcctcattgctgacttggcagtgtcttatcctctaactcaagaattatctttcttacatcatttccttaggtaaagttgtaacacgctcaaaggcttagctgtctgtaaatagggagaactaggaagaacttagaggtccaggaaaaagggattcaattacaatacacagaatgaaatctcatggagatattataaatatgaaagaatatttaatgaagacatgcgcttatgacactgttcactgaaaaaagtgcatcactaaaagagaacatggaatatgatctcattttaaaatacgtggttttatcacaaaaagaacattccaaccaggaacaaaatgtacatatctgtacatacacacatacacatgaacattaacagaagtaaggaagagagagcattacgatactgaccgtgatgagcactggctggtagaatcatctgcagttttccatttcttctagcttttgtgttttataaaatgaactttactagttgttgagggaaaaataagctattgtttctagccagcagcataatatcagaatgaaccaagaggaaaacaattctagattctaacagttctaactagttctgtgacatcagttctccatccccctataaaattcctatagattttatagtttagcagaagaaactagatactttaggtcagtcttaaataagtatctgtaaaagtggaaaggaggaaacataacttaggagtaacacaggtagacccaggtcaaaaatccctatgaaagatggcattgcatctagtggattaacagagggtcacaggtacactaaagaaaagcatacttcctgcaacagttaaaaagaatgccagattctagtgaactgaacaggaggaaggaagggggaaaaaaaaaagattacaaggtcccctacaccgtaaaataaagagatgtccttcaattatggtccgagaaccacctatgttagaatcaccacaagggactaactaaaatgcagattccagggccccaaaacagacttaaatcgtaatttctgggggtggggcaggggaacttggcccctcccccgccaacccacacacacacattctctctctctcttatggattggtggccactgtggtatagttaacagggcgagtctcaaaggcaaaattacttgttttattcactgttgcacattccactggttaacagattgcttagctcatctcaggcaattattcaatattacttaaacaatgagcaagggaacaaagtctctttacatcacagttctaagtgagaatctaaacatggttttttccattatccccagctcccagatctccatggtaacagctatgttttagtcccgttaactaaaacagaggtatattttatcttttacatttgcacacgttatctccatctatgtagaacagagtctgacagccagacgtgcatggatgaaaacttgactgacgccatgagtatgcactagaagagtccaaaaaagactgaatgtttttctacgtactctcttactactattgtttgcttgcatttacacactgctatgtctttcttttagaagattaaatgttccttgaagaaacatagtcaaagtttttatacttccttaggacatgtgcaagttaggaaaacctaacactgttcgaaagacaattgatacaggcacacatcatcacactgggcctttgttttacttcttaatgtgactactagaagggcacgcacatcttaatgtagaatgtcaaacaggaaaaaaacaaacaaacaaaaaaaacagggcacaaactaatccttgatccctaaataaccaaagatttttatagtcttcatactgagattttaactaagtaaatgtgcttcattttttaatttttttttttttttggtggagagagggtcttgctctgttgctcagactggagtgcaaacggcatgatctctgcccattgcagcctcaacctccgaggttcatgagatcctcctgcctcagcccctcaagtagctgggactacaggcatgcgctaccgcacccagctaatttttgtatttttcataagctgtggtttcaccacgttgcccagactggtcctgggctcaagcaatccacttgcctcggcctaccaaactgctaggattacaggcatgagccactgcgcccagcctgtatatgtgcctttaaactaaaaagtcaccaccagtattacaaccacagaaacacacgcagttgaacagttactatttaaataaaagcctcactgcctgtatgacctaaaagcatagctctttcaaaagtcttaatattaacacaatatagtaaattgtacttatcttcctaaaaaattagagtggtaagaaaggaataaagaacttggatataaaacctctaacatgcttgagtagcactgaaaattaattattcccatacttttccatagctaaaactagttttataaatatcattatatttttttcccagcaacaagatatttttaaacagtgatttttagaaaccgtacatcttaagctgctctgtccaataaagaagccactagccacatgtgtctaactacttgaaatgtggctagtctgaattgaatcgttctgtaaggataaaatacatacagatgttgaagattcaataccaaaaaaagcaaaatttctcaacaatttattatactgttacattttagatatattaggttgtatataataactaattttttttttttttttgagacagggtttttgctctctcgcccaaactgtagtggcacgaccatagctcactgcagcctcaacctcttgggctcaagcaattctcccacctcagcctcccagtcagctaggatacaggcacacatcaccacactgggcctttgttttacttaatgtggctactaaaaagttaaaatcatatatatttagttcatgtatttctattgaacagagcttatctaaaactaattgattaaatttaatttgtttgtcaagggaatttgaagaacaatcaagaaaaagttttaggccgggcacagtggcttatgcctataaacccagcactttgggaggccgaggcgggaggatcatctgagatcaagagttcaagaccagtctggccaacatggcgaaagcccatctctgctaaaaatacaaaaattagccgggcatcacggaggcgtgtgcctgtaatcccagctacttgggaggctggggcaagagaatcgcttaaacctggaaggcagaggttacagtgagacaagattgtgccactgcactccagcctgggagacagagtgagactctgtctggaaaaattaaaattaaaaaaaaaaaaaaaaagaaaaagttttatatggaatacgtattttccacataaaagtaaccatcactaaaactgtacctgcaagaagaggtgttttaagattactaaacttttaaaaccactgtattttgaatacggggtatgtctacattaacagtttttatttcgtattactgctaagtggatgtggttcttagacaaggcagatccttgggtttgtttttgttcgtgggaaagttgcagttgatcattatcaaattataccaccttctcatcaactttagaaactataataatctcaccaccccaaagcttgaagactgtttcccagaggtagacttacacagccagacttgtttatatttccatttttaatgttttctacaagtaggcaaagaaaataagcaaataattgtgttcaagaaactcagtatgagaattctcagtttcacgcactctgagaactccaatgtatcaacaaaacaaaaggttgacaagtttgatctaaatatttctgcctgacattcctcatcctaggtaactcaactctttcttttctcccaagatataatttcactaggctttgtagataacccttctcctagcagaaaacacaatgcaaatgcaatgctacgttaccagtctccaatagcagcaaattgttcctgattactaagctctttttccttctagtgagatagaacaggtatgtttaccacacttaaggacaaacaagttaaaaaaaaactttcacttaagtgcaacatgcttccccaactacatcagtattttcccaaatttgaactcagtcacattaatccatcatttccttgaatgaataaaaccttggccaaagtattaaaattttcccttttctcacctatgacatatttgccaattaaacacaaaaatcctgaaaatgggccaggcgtggtggctcctgcctgtaatcctagcactttgagaggccgaggcaggtggatcacgaggtcaggagatgagaccatcctggctaacatggtgaaaccccatctctactaaaagtacaaaaattagccaggtgtggtggcgggtacgtgtagtcccagctactcaggaggctgaggcaggagaatcgcttgaacccgggaggcggaggttgcagtgaacaaagatcgcaccattgcactccagcccaggcgacagagcaagactctgtctcaaaaaaaaaaaaaaaaaaaaaaaaaaaaatcctgaaaatgatgaagtctctagccctatcatgtcttctgagaacagaattacatataaaaatacaccacagaaacactgtcagcaacatccagacctgggaaactctccagcacaaacatctaaagtttttttttttttcttttctttgagacggagtctcgctctgtcgcccaggctggagtgcaggggcatgatctcacagctcaccacaacctccgcctcctgggttcaagcgattctcctgcttcagcctcccgagtagctgggattacaggcgcccaccaccacgcccggctaatttttttgtatttttagtaaagatgaggtttcaccatgttggccaggatggtctcgatctcctgacctcatgatccacccacctcggcctcccaaagtgctgggattacaggcgtgagccactgtgcctggcctttttgtctttgtttgttttttgagacagtctcgctctgcagcccaggctggagggcagtggtgcaatctcaggtcactgcaacctccacttcccaggttcaagtgattcttgtgcctcagcctcctgagtcattggaattacaggcgtgtgccaccatgcctggctaatactgtatttttagtagagacggggttttaccatgttggccaggctggtctggaattcctgaccgcaagtgatccacctgcctcggcctcccaaagtactgggagaacaggcatgagccacatgcccggccaacatctaaattttttaacaaataaatttcaaagtgaaaaaaggaggagggaatccttgacattaagtaaaacaaacttaagacctattaaccaatcataatggaagaaacttatttaaatcccaattcaaatacaatggaaaaaactaatcaggaaaattggaatatttaataccagtgagttagtgtcatgttttttaatatgtaatgataatgtctatgctttttaaaagtctgtcttttagagatacatgctgaagaattaggaatgtaaaaagcttgctgtcttcaatttgttttgaaataatttggggaggtgtggcattgaggcacagagatgaatcaaagccagtcatcatttggtgattcttgaagctaggtgatcagtataggaggatttattataccattatctcctctgtggtacttttaaaatttccactgtttttccctactctcttaaatctagaagtcaccatcgacacaaatgttaaattccattaaaatcaaactctgggcttgttagtacccagaagaaggaatttttaagagaaaaatataatttaactttacatgactatctggtagtaaagagatgttaaatactttccatgcacataacctgagatgatattagtatttcctataccacaaaaaaactagaattttctaagattgttacattagacagtgttagatgtccttcctttgcctaggaaagtacatttggatttattttgctgcagtaactatagtataacttcaaatataggatattggctgggcccggtggctcacacctgtaatcctagcactttgggaggccaaggcgggtggattacctgaggtcagcagttcaagaccagcctggccaactgggtgaaaccctgtctctactaaaaatacaaaaattagccaggcatggtggtggtgtgcgcctgtagtcccagctatttaggaagctgaggcaggagaattgcttgaaccctggaggcagatgctgcagtgagctgagatcgtgcgactgcactccagcctgggcgatagagtcagaccctgtctcaaaaaaaacaaaacaaaaaagcaaatataggatactttttaaactttgttctataacttaatgtatattaataaaattatcggccaggcatggtggctcatgcctgtaatctcagcactttgggaggctgaggtgggtggatcacctaaggtcagcagttcaagaccagtctggcccacatggtgaaacccccatctctactaaaaacaccaaaagtagccaggcatggtggcaggcacctgtaatcccagctacttagggggctgaggcaggagaatcgcttaaacccaggaggcggaggttgcagtgagccgagatggcaccattgcattccagcctgggggacaagagcgagacttcatttcaaaaataaataaataaataaataaataaataaataaataaaacaatctggactgtccacttaaatgaaatcctttgttacattaagacaattctgcacaattcatatttatgccaattctgatagaagcaaaaaagctgctgtacatgaaaagttacatcttctagccagcaaaacaaagtcattaacatataggaagcttaatcatttccagattatttctgccacaactgcaatttaacaacaaactttaagatttcaccaatattgagaacaaaagtaaaaaactattcagtgactccttatgggtaaagccataccaagtacttgaaatacatttccactgtacccttacaccaaacaagtgaggtcaatttaagactcccattttacagattaaggaaacagcctcaaaggattattttaaccaaagtcaaaacgcaagtcaacgaaaagccaaattcaaactcatacctcccaatgtccatgctacgtctacctttatcttagatgaatactatttggcttctgtgtaaataaaactcacttacacagatattcaggaaaattgttcaatataataacaacatgaatcccaatctcctggaggaaacactagaaattatcgaacttactttcaaattttaatttttttgagacggagtctcactctgttgcccaggctgaagtgcagtgccacgatctcggctcactgcaacctccacctcccaggttcaagtaattctcctgtctcagtctcccaagagattacaggcacccaccaccatgcctggctaatttttgtatttttcgtaaagacgaggtttctccatgttagccaggctggtcttgaattcctgagcttaagtaatctgccccccttggcattcccaaagtgctggaattacaggcatgaaccaccaagccactacactgggccacatacaaattttataaagaagactcaaggtcacatcaacatagatcatttcaaggcaaatatccaacctcagtcaccatctaaggtaaatgagacaaataagtacactaactgacaaaagatccaatgcatatgatgtttcaagaagttccctttgaccagcctgggcaacacagtgagaccgactctatttttaaaaaattttttaattcctttctactgggaagtcatttcaaggaccccacacgcttataatggttgttaggctgataaaataatctttaaaaatttagttaaataaatttagttataataaccctagttgtggtcctttaaaacttcagtaactatgtcacacttccagttaaattactttctcagaaaagatgacagatttccagtagcaataatgtaaaatctacttaataaactcataagactgagatgctaaaaaaaatttaacgattctactttccaccattatagttgttaaaaatgttacatatttttcaatttcaatttaaaaagttacatgtttataggccaggcatggtggctgacacctgtaatcctaacattttgggaggctgaagtagaatcacttcagtccaggagctaaagaccagcctgggcaacgaagtgagacctcatctcaacaaaaatttttaaaactagctgggcacagtgacatgtacctgtaagccctagctactcgaaggctgaggcaaaagaatcccttaagcccaggagtttgaggctgcaatgagctatgataccaccattgcactccgggctggggacagagaccttgcctcaaaataaaaaataaaataaaaagtgacatgtttggccgggcacggtggctcacgcctgtaatcccagcactttgggacgccgaggtgggcagatcatgaagtcaggagatctcaagaccatcctggctaacacggtgaaaccccacctactaaaaatacaaaaaaaaaaaaattagccgggtgtggtggcgggcgcctgtagtcccagctacttgggaggctgaggcaggagaatggcgtgagtagggggcggagcttgcagtgagccaagatcgtgccactgcactccagcctgggagacaacgagactccgtctcaaaaaaaaaaaaaaaaaaaaaaagacatgtttaaactctgtcccttatgataatgtaggttgtgatatcatgcttataatcagtgtgattacacaacacacactacccctatgagtttaacacgtaaccaaccaatctcacagaggatacaagtctctcaaaggaagaaaaactcttggtctcctttccagtgttgatataattggtcaaaacatttaacataaacaaagaaactgaggtgggtgggagcaccaagcaccaaagatagaaacaaatggctctcacctttgcatagtactcacactcaacagtacctagagcacatctacctgccctcgggctttctctgtaacagaaccacaaaaatttacaatggccctttcctctctgccaaaccttctatctcttttttgaaagctttacaattagttgagggaggtggctcacacctgtaatcacagcactttgggaggccgaggtgggcagatcacgaggtcaggagatcgagaccatcctggctaatacggtgaaaccccgtctctactaaaaatacaaaaaattagctgggtgtggtggcacgcgcctgcagtcccagctactcgggaggctgaggcaggagaatcactggaacccaggaggcagaggttgcagtgagccaagatcgtgccactgcactccagcctggacaacagagcagaaattgtttagttatttcaaaaaaaaaaaaaaaaattagctgggcatggtggcacgtgcccttaatcccagttactgcagaggccaagacaggagaatcacttcaacccaggaggcagaggttgcagtgagccgagatcgtgccactgcactccagcctgggcaacagagagagactctgtttcaaaacaaagctttataatttgaaaaatcatcataaactaaatctgttattaacaatctgtatagggtattacactttagtgggatgggccttaacaccttgtaaaaatgttgaaatcagtgttttggaaatgcgtaagctttaagaatgtgttacacagccaagtactttaacaactgcctgaaacagactagtagaatcaagtgcaaacataagctatcccgacatactgtctattgggggagcggcacaccaggactccaacaacccctaaccaccagccacctgtccacatatcaggtcatttttatttttacgcaggctctactagggctatagaaggacctaagtcaaagttttagcttttttctaagaggtcccacatcatatacataaacaaatttaagcctactctactgacgattaaaccttgaacataagaatacaatatcagttgcaagcatttgggattctgaatcccttctctatagatttatctatcagacatcatttaaatagttatttacccctatgtttacaactttaggtatcctgggacttgggaaggctttacacacataaataacttaaaaattagttgcagaatcctacaagcagaaaagaatagcaaataatatacttgaagtattttttggtctaccatttcaagagcctatatattcagagtcatgacagttatgagactgaataaatagcatcaaaaccaccagatctgatttacttctaacaagacacacatcttaaggtggaaggatcgcttgaggccaggagttcaagaccagcctgggcaatatagtgagatcacatctctgcaaaaaataaagacacatatgttaagaccaggcacggtggttcacacctgtaatcccagcactttgggaggccgaggtggacggatcatgaggtcaagagatcgagaccatcctggccaacatggtgaaaccccatctctactaaaaatacaaaaattagctgggcttggtggtgcacgcctgtagttccagctacttgggaggctgaggcaggagaatcgcttgaacccgggaggccgaggttgcagtgagctgagatcgtgccactgcactccagcctggggacaagagtgagactccatctcttaaaaaaaaaaaaaaaaaaaaaaaaaaaaaagacacatatgttaaaattctgtagatttagggaaaaaaaaaaagacttgcagaaccttaactgctcccacctctaccagaaattgcaaattacctactcagagagtgtgaaaactcagtccagctaagcatttaaagtgactgccaattatgacagtggttaaaaatattatacttgtatcattcacataaatctgtttataaattgaataagattactataaaatgttaattattctggctgggcggggtggctcatgcctttaatcccagcactttgggaggcagaggcgggcggatcacctgaggtcgtgagtttgagaccagcctggccaacaaggagaaaccccgtctctactaaaaatacaaaaaaattagccgggtgtggtggtgcatgcctgtaatcccacctactcgggaggctgaggcatgagaatcacttgaacctgggaggcagaggctgcagtcagccaagatcatgccattgcactccagcctgggcaacaagagtgaaactctgtctcaagaaaatttttttaaaaagttaatttttctctttcaaaattgtaaattaatgcttttctgtctccctagcacctaggcataatggttgtcattggcagggctcaaaacataagttgaaagaaaatgaaatttcaagtaagcaatggaaatcaaactgcaaacatcaacaacattaaaatgtaatcccttaaggcagatttatcagttgtgtaacggattaatgtcatcttaggttttatgcaaggtcaataacatagaataacattccatttttgttttgttttttttagatggagacttgctctgtcacccaggctggagtacagtggcctgatctgagctcagtgcaaccaccgtcgcccgggttcaagcaatcctcctgcctcagcctctggagtagctgggattacaggcacccactaccacgcccagctaatttttgtattttcagtagagacagggtttcgccatgttggtcaggctggtctcgaactcctgacctcaggtgacccacccacctcagcctcccaaagggctgggattacaggcttgagctaccgagcccagtctgtttttttcatttttaaaataacaagaaataacatattataatcagactttgcatataccaatctctagattttaaggagttacagtttcaattttaatttataaatattcattttacatgttttgatgttattttactaaaatgtccatctagtcctttgataaattcagagatttatggtggcagtatgtaaaccaaattaaaatgtaccataaaaccaggtaactagaattttatgtttaatcaaaccatttggaagcagtttagtgaaatttcagtatcttaaattatactgttattaaacttattttgaaaaagttaaatattaatactgaaacacaaatcgtccacaaccaaaagtaaaccgtatcaatcagatctacatatttaaacattacagtgattttttttttttttttttttttttttttgagactgtgtcttgctctgtcacccaggctggtgacaccacacccagtgcagtggtgcgatctcggctcactgtaaactccgcctcccaggttcaagcgattctcctgcctcagcctccagagtagctgagattacaggcatgcgccaccactcccagctaattttgtatttttagtagagacagggtttcttcatgttgatcaggctggtctcgaactcccgacctcaggtgattcacctgcctcggcctcccaaagtgctgggattacaggcatgagccaccgcgactggcctatttttgtatattttagtagagacggggtttcgccatgctgaccagcctggccaacattgggaaaccccatctctactgaaaacacaaaaattagccaggtgtggtggcatgcacctgtaatcccagctacttgggatgggaggctgaggcaggggaatctcttgaacctggaaggcagaggttgcagtgagctgagatcacaccactgcacattccagcctgggctacagagtgagattccatctcaaaaataataataataataagcaaaaataaaaaataaaatatacaagattttctgggctgggcacagtggctcatgcctataatctcagcactttgggaggccaaggagggtggatcacgaggtcaggagattgagaccatcctggctaacacggtgaaaccccgtctctactaaaaatacagaaaattagccaggcatggtggcacacgcctgtaatcccagctactcaggaggctgaggcaggagaatcgcttgaacccaggaggcggaggatgcagtgagctgagatcgcgccactgcacttctgcctgggaaacagagggagacttcgtctcaaaaaacaaaatacaaaacaaaaaaaacaccattagaattaaatttagagcactgaacaagttccagttaatacaatgtgttgtgcatatgctatttaaaaagactgctctgaggttttcagaggtttgggggttttgttctttttttatttttggttaaacattgcacaacacatttcttctttccatcataattggggtaaaccacatgctggagtttcctgaatatcagaaaaatctttaacaagtacaataatgaaacctaagatattattaatatcctattaatgacaagatgtttaaataggttataatgtattattgacctacatatgggtgaatatactttactcctaaatcaagtccactactttaatagtatttaacatatcactttactgcaattattccctatcccaccttccaaagaacctttaaaattgctttttaggtcaggtgcgggggctcacacctgtaatcccagcactttgggaggccaaagcaaatggatcacttgaggccaggagttcaagaccatcctggccatcatggtgaaacccccatctctactaaaaaatacgaaaattagctgagcatggtggtaagtgctggtaatcccagctacttgggaggctgaggcacgagaatcgcttgaacctgggaggtggagggtgcagtgggctcagattgcaacactgcactccagcctgggtgacagagcaagactctgtctcaaaaaaaaaaaaaaaaaaaaaaattgctttttaaaacagtgaggtagttgggttcggtggctcatgccagtaatcccagcaatctgaggccgaaggaggaggaacactcaaagccaggagttggtgaccagtttgagcaacatagagttcccatctctactaaaaatttaaaaagaaagccattaatcaggtgtggtctcagctcctcaggaagctaaggtggaaggattacttccatccagaatttagaggctgcactgagctatgattataccactgcattccagcctgggcggcagagtgagaccctgtctctaaaaaacaacaataaataaaacaaaacagtaaggtatggtgctaagtcgtattttttctaaaaaagcatacattcacagatgctcacatatacatgtaaattttccctaaaggaacacaataaactgcacagtagttgcatttgaggaaggagaaaaataaagtatcatttaaattttgccatgtgcactgtttttctaaaaccttccaagctttttaattaatttagagaaaactacttttacttagttcctgtgggtgttttgtatacagtgtaactaagtattacttagttcctatgggtgtttcgtatacactatagagtattatttagtatgactaagtaaaactgcttttacttagttcctgtgggtgttttgtatacagtgtaactaagtattacttagttcctacgggtgtttcgtatacactatagagtattacttagtatgactaagtaaaactacttttacttagttcctgtgggtgttttgtacacagaaaatagcttaagattccattagatttgtttcggtatgtacattattcatcaagagacctaagaataaataggaacactgaagaagcgtgtaacaatgctttaccaatattgttatagatagcacatcaaaatgccagagactggggaaaaatgcatgatcatgagctaaagttagactggtatggaaaaaataacctgcaggtgattaacaattaccataagtgacatacacaacatacaatagttatgtttaagtagagggcagtatctgaatttaaggcaatgcatcatgtatatgaagaatgaccttatttccactagttgtaagatatccccagaaaagtattagatttattacatttaggtagataagtctgtagtaagtataaagctgctcgtctaaaatgaagcacaaaacaaattaaaagaaaaaataaaatgaagcacaagcaaagatttcatctttgaaattagatgatcataatctttggacattagatggtcataatcatctttccctctgtgctgaatcattgccttcagaataccaccacgttaatacacttgcctttaaaaaacctcacttccatagtctgagcaacaaaataacaactgtaacatgttataatctatgcaataagattccatgagtctaatattaatataaacaaagtaaattggggaaagtaaagtttattccaaataataaatgtagatgcccagtgtggtggctcatacctttatgtaatcccagcactttgggagaccaaggtgggtggattacccgaagtcaggagtttgagaccagcctggccaacatggtgaaacctcatctctactaaaaatacaaaaaattagctgggcatggtggcgggcacctgaaatcccagctattcgggaggcaggagaatcacttgaacccaggaggcagaggtggcagtgagccgagatcgcaccactgcactgctgcctgggcgacagagcaagactccatcttgaacaaaataaaaaacaaataataaatgtagaaaaaataaagagaagtagaaagccactatttgacagccactatagtagcagtgacagttgctgacaagaatcatcaatggatgctaaaattagtgaaagtattgagagacagaatctctacattgtctcaaaatatctccccacaaagttcttattacaaaagaaaaaatagtaactttaccctgaagaagcctggcagacactacttaaccaattggtcaaagttaccaccactactgaaacaaaaatcaacaaacaccatgtgcctctagatgaggtgcactgaaagcaatatcacttctgaggaattccatcaaaaatgcctcacctggtgccaggcacggtggctcatgcctgtaatcctagcactttcggaggctgaggcaggaggatcacttgaggtcaggagttcaagcccagcctgcccaacatggtgaaacctcatctctactaaaaatacaaaaaattagtcaagtgcagtggcgggcacctgtaatcccagctacttgggaggctgagggagaatcacttgaacccgggaggcagaggatgcagtgagccgagatcgcgccactgcactccagcctggtcgacagagtaagactctgactgacacacacacacacagcctcacctgatgctaaccatgggagacatcagataaacccacattgaggggcattccacaaaataaacaaacaaacaaaaaactagcttatactcctcaaaaacaggaaagtcattaaatcaaatgaaggattacaggtcgctcatgcctgtaatcccagcacttaggaggccaaggcaggtagatcacttggggccaggagtctgacaccagcctggccaacatggtaaaatcccgtctctactaaaaatacaaaaaaattagccaggcatggggtgtgtgcctgtaatcccagctactcgggaggctgaggaatgagaattgcttgaacctgggtgcggaggttgcagccagccgagatcccaccactgcagtccagcctagacaacagagcaagactctgtctcagaaaaaaacaacaacaacaaaaaaatgaagaccaaggaactgtcccagattaaaagagaccaaacaggctgggcatagggactcacaccagcaatctcagcacttggggaggctggaatttggcaggcagatctacctgagctcaggagttcgagaccagcctgggcaaaacagtgagatcctgtttctacaaataaaatttaaaaattagccaggcatgatggtgtgtgcctgtagttttggctactcaggagactgaggtgggaggatcccttgagtccaggagttcgagttgcagtgagccatggtcacagcactgctctccagcctgagtgacagagcaagactggctaaaaaataaaaataaaaaaagacaagaacctatccagtgataaaagtcagccagttattttttacatttaactaatatttacccagggcaaggaaagctgtctgaaacatgtcagaggccggactctccatttggtcatccttaaaaatacagtgagtgaccacaaggttccagcctcaaaatgtaaactgtcagaagaaatgttgatggggtcctgaaatcattattagattttgttaaagttttaggaataacagaaggaaacaaatgctattcatttccttaggcacgacctggtatcaacatgtagggttcatttcagtttgaagaacttaagtgtatcgatagatgcccagatgtccaaattcatttcatcctcctcatgtgtacttgttttcagcagtccttaactgtttattctaaacacttatcttttcaaaaatacattttagagacaggatctcactctgttgctcaggctggagggcgtagcacaaccacagctcactgcagctcactgggctcaagcaatcttcccacctcagcctcccaagtagctgggactacaggcatgcaccatcacactcagctaattttttattttttgtagagatgagggtctcactatgttgcccaggctgtttgtttgtttgtttgtttgtttgtttttttgaggcagagtctcgttctatcacccaggctggagtgcagtaacctgatctcagctcagtgcagcctccacctcctgggttcaaacgattctcatgcctcagcctcctgaggagctgggaccacaggccacaacaccacacctggctaatttttttgtatttttagtagagatggggtttcaccatgttggtcaagctggtctcgatctcctgacctaaagtgatctgcccgccttggcctcccaaagttctggaattacaggcatgagccactgcatccagccacccaccctgtcttgaactcctgggctcaagcaatcctctgggctgcagtttcccaaagcgctgggattacaagcgtgagacatcacacctggcaatattttatctttcatgcacttagatttttcttctttttgtttagaatttgacattttttcatttgcttatcttcctataccgatttattatcttttttttttttccaaactgacttccctatcaaggctaatatgccatggaattgcataaaatcctcacttgctcttgttatgatgtaaatacatattcaccagaatacctgatacaggccgggcgtggtggctcatgcctgaaatcccagcactttgggagaccgaggcgggcagatcacgaagtcaagagatcgcgaccatcctggctaacacggtgaaaccccgtctctactaaaaatacaaaaaattagccgggtgtggtggtgggcgtctgtagttccagctactcggaaggctgaggcaggaaaatggcatgaaaccgggaggcagagcttgcagtgagccgagatagcgccactgcactccagcctgggacacagcgagactccgtctaaaaaaatacctgatacaattttttttcctttttctttttcttttttttttttttttttttttgagagagtctcactctgtcgccctggctggagtgcagtggcgcaatcttgggtcactgcaaacctccgcctcccaggctgaagggattctcgtgcctcagcctcctgagtagctgggaccacaggtatgcgctaccacaccccgctcattttttgtgtttttagtagagacgggggtggtttaactctattggccaggctggtctcgaactcccgacctcaagtgatccatgtggctacctcagcctcccaaagttcatgtgaaaggcatgagccatcacacccagccacctgatctaatttcaaaccacacattagagcagagcagccattctcaaagtatggtataaggaatccctgacacactttcaggaggtccaagaagttaagactattttcctaataacactaagatgttatttgccttttctgctgtgttgtatttgcactggtagagcaaaggcaatgatgagtaaagctgctggtccttagcatgaagcaatgcagtggcactgaactgtactagtagtcactgtattcttctctggcatttgcagcgaagaattatgcaaactgtttaaaaatgtcctaatctcaatccttcagtatacatccttttatgatctgtatgaagaaaagggaagcatgcataaagcacttctgctacctatcctggttgtctgcacaaaaagcactgtgcagttgtttgagttgcaagacgaaccagtcaagcaccgtttctacctgaagaactagaagcaaaatgtagttacttaaaaacttgagtatctggcagatattttctcaaaaaggaataaaatgagtctgtcacttcaggtaaaacgattttcctgaagtatctgttgccaaatgactaaatttgagcttttaagtaaaaactagtattttgaaaaacttctatctattaccaatgagctttgacagcctcccaatcctcgtggataaagatcctttccgagtataagacaatcaatggattctttttgtaacaagtacaaaaaaaattcactgatatgatttcagattccacattgaaactagactttaaaaaaactaccacttggtgttacagctcttttagaatttgtccagcaggtggttttccggtctttaccagtaagcccccacccccgcacctccgcaaaaaagctaccacttgtagctgggtgcagtggctcacgcctgtaatcccaacactttggggaggccaaggcacaaggatcacttgaagcccaggagatcaagaccagtctgcacaacatagtgagatcctgtctcaatttaaatttaaaaaggaatttttttttaactaccacttgtcatattttgatgtagcaccaaagaatatctgtaattatttatactccttccttttctaaacacatatccatatgtggctggattttcctcatatacttcaatcaaaacaatacatgacgacaaactgaatgcagtagtagttaccagtttccagttgcctcttaggccaaagaaacttacaaaaatgaaaaacagttctcttttataagagtgttttagggccagacgcagtggctcatacctctaatcccagtactttgggaggctgaggtgggcggatcacttgaggtcaggggtttgagaacagcctggccaacatggtgaaacctggtctctactaaaaatacaaaaactagtcaggtgtggtggtgcatgcctgtagtcccagctactcgggaggctgaggcaggagaatcgcttgaacccagaagcggaggctgcagtgagctgagattgcatcactgcactccagcctgggcaacagagcaagactctgtctcaaaaaagagttttttatttaaaattttatgataacatgtaatgggttttttataaaacccctatcattccaggaggctgaggcaggagaatcgcttgaacccaggaggtggaggttgcagtgagatgagattgcaccattgaattccaccttgagcaacaacagctaacctccatctcaaaaacaaaacaaaacagacctctatcattccttataactgctacaaaatatgccacagaatatatcgttagggctgggcacggtggctcacgcctgtattcacaacaccttgggaggccgaggcaagcagatcatttgaggtcaggagctcgagaccagcctggccaacgtagtgaaaccctgtcctactgaaaatacaaaaattagcctagtatggaggcaggcgcctataatctcagctactcaggaggctgaggcaggagaatcacttgaacacgggaggcagaggctgcagtgagccaagattacaccactgcactccagcctgggcgacagagcaagataaaaaaaaaaaaaaggaatatatggttagaatagggtatgttttcttttttccttttttttttttatttattttttattttttgagatggagtctcccgctgtcaccaaggctggagcacagtggcgtgatatcagctcactgcaagctccgcttcctgggtccacgccattctcttgcctcagcctcctgagtagctgggactacaggcgcccgccaccacgcccagctaattttttgtgtttttagtagagatggggtttcaccgtgttagccaggatggtctcaatctcctaacctcgtgatccgcctgcctcagcctcctcaagtgctggaattacaggcgtgagccaccgcacctggccagaatagggtatgttttcttttgatggccatttaggttatttcctatttttaactattaaacaatatggaaaaaacacatgtctttttgccaagtatgtctttgtaatagaatactacaagtgaaattgctgttatggagaaaggaattaaacatgcctcaaagttacaaatagttgaacattaaagtgcttattctttccctttaaaacatgggttcccccaggcgtggtggctcatgcctgtaatcctaacactttgggaggctgagacgggtgaatcacgaggtcaggagttcaagaccagcctggccaacatggtgaaaccccatctctattaaaaatacaaaaaattagctgggcaagtggtgggcacctgtaatcccagctactcgggaggctaaggcaggagaatcgcttgaacccaggaggcggaggttgcagtgagccgagatcgtgccattgcactccagcctgggcaacagtgcgagactcatctcaaaaaaaaaaaaaaaagtggggggcgcacagggctgggcgcagtggctcacacctataatcccagcactttgggaggccgaggcaggcagataacgaggtcaggagatcgagaccatcctggccaacatggtaaaaccccatctctactaaaaatacaaaaattagctgggcatgatggcgcacacctgtagtcccagctactctggaggctgaggcacgagaatcccttacccagcaggcggaggttgtagcgagcagaaaggttgcagtgagccgagatcgcgccactgcacttcagcctgggtgacagagcgagactccgtctcaaacaaacaaacaaacaaaatacaaataaacatgggttcttgctgtgttacccaggatggtctcccaaagtgctggaattacaagtatgagccaagcaccttggccttaaagcacttttaaacaagaagaaaaaaggaaggactctcagtattgtcttcctttacaaaaattccccttctacaactcaaagataggcaattgcaaaatgtcccaaacagtaaaattagagctagagatcttttttgctcgaaaagtagacaacagtgttagtttcagattatctgtacgatactgttaaaatgtgacgtgtaatatagtataacctaagaattctgtgttttacagactcccacctactagagaccctttttaccaattcctgcttggcgatttggatggagctcttttacaatattgtacgatattgctgattaaaactgtgcttacagattacacaaagccatgaggactgggttgttttccataacacttagttgaaaggtattctcattttaagttctaatagatactgccaaatagtgtgccaagaagtctttgccaatttactctttagctatatgagtggccatgcctccacaaccttgccaacaccagatacggccaatcttattcatttttctccaacctcataggcagaaaatgtcattatcgttggcacttccctaataactagttagacaagggtgttttttttgtttgttttgctgttgttgttctttgaaataggatctcactctatcgcccagcttggaatgcagtggtgcaaacctgggctcaagccatccccctgcctcagccccccagttagctgggactacaggcacgcaccaccatgcctggctaatttttgttattttttgcagggacggggtttcgccatgttgcccagcctggtctcaaactcctgagctcaagcgattcatccaagtgctgggattacaggcatgaaccaccgtgcccagcctagattggatatctttttgtacacagactgacttttcagctgtgcccttctgaactgccacttctcatccttcgttcatttttatactgtttctacctctttggaattaggaattcatctcctggtctattatttcctttacgtatgatctctcctaagataattccataactaaacacattttagggattctaagatccatgcacctagatataaagcaccaattcttaacttattcacagtgcataacccatattttacaaagaaatgtgaaacactcctatgtctccgtatatatgaaacataaaccataaaccacggggtcatacgggaataggcacacccatcccccattttccactaccacatggtaaacacacaaacttattagtgagacaatatcactttagtaccagataatccaagaagtcctttacagacattatcatttaattcccaacaaccctctgccataggtcttattaccctcatttacagattttaaaaacagaaatctcagagtttaatcagtttgcacaagatcacagggctaagcaaaggttcctactgaggcctgtgtagctccaagcaagatgccactggcccacccttaccactgtgctgtactgctgtccccaactttaggtagtagtacgtgcacacagaagtgtctatcacatttttctccaaaggttcattacatcacttgggatgtctttaacaaaaatcatataataccaggagctttaaccagcaccattgattgtcttgccacagctaaccttaaaaaaattacatgggctcagtcaaccttattataagattcctagtcctgtatcacaatttgccttaattaccctgtcagaggataccctaagaacagctgtgaactccatgaaatgttttgggagcatagccagacccatgcttataaagtactgaagacgcaaaagttcagtgggatctctggtgagcattttccaaaattaacctaggcatcagtcttccatgataatcccaaatcagcatttgctaaatggcatgaactaaactacttagctcctaaagtcaaacacatgaagaatgagaataatgcagtcactccatcacgcacgcaggctgctccagctgccctctccgctcagcctcaatcaccatcctgcctcacactccagcctctttaatctcaaacagcttgtagttcccacacacaccccaggatgtttcacacttacatgaggtggctcctgctgtcccttctgcctcttccctcctgggtgcacacggttattagcctctgcctattttcacatccctctctgaatgtatttctcactggtaacaaccaggctaagcctaataatgctccctcctcctatgttctggggcatctcacatataccctatgacatattgacaacttctctttacttggagagattttaacccacctttaggatcactaccacagtgaaccaccattactgttgaaaaataaaaagactgtcacccaggaaatcagacagaacaaagtgaaagccactgtactccatgtctttcttcaggacaagggtcttactattttttttggagacggagtctccctctgttgcccaggctggagtgcggtggcgcgatgtcgactcactgcaagctccgcctcccggattcgagccactctcctgcctcagcctcctgagtaactgggactacaggcgcccgccacaacgcccggataattttttgtatttttagtagagacggggtttcactgtattagccaggatggtctcaatctcctgatctcgtgatccacccgcctctggctccgaaagtgctgggattacaggcatgagccactgcgcccggcagggtcttactcttctttctagcccctgaaacctagcatagaatcaactatgagcacaggcacttaatctatgcttgttaaactaaaaatttacataagatattaagtcatttcagaaactcaaaaaaatgcaaaaataggtaaactcgcatacaagaaatacagaaactaaaaatttcaacttaactctccaaagaaagagcaagagcttctccattttttgcaaaaccagctggaaaaaaaaaaaagacatctggggagagctcagtcacttttcaaccagcattttttttgttgtttttttaaccactattaccacaggttctcttaactagattctctcattatctgccctgctgggaccaaaagctgagtagcaccttcttttggaagctaattcttaatcaaattcctcctcaaaatgtggaccttcttgaagtttcctccgcaagaaactactgttagtttctgaagtaggatgcaaaatttaaggtgctaagtacgggagagcatgagtcctagacatcttagctataaggtatcagaacttcagctttacagctttttacttaatttttatatacaaggggcacaaatgaaatgggcaaagacttgtcagagttagcacatccatggtagaagagtgtgttcctacaattatatagtcctccatgtttgatgagacagttcttactcaaacggtctcactgcacacttcattgaaagaagctctttgttgtcaaacttataactaattatgtcaacataagaaatttagttttgaggccaggcgcagtggctcacgcccgtaatcccagcactttgggaggccgcggcgaggggatcacgaggtcgagatcgagaccatcctggccaaccaatatggtgaaccccgtctctactaaaaatacaaaaattagctgggcgtagtggcacgcgcccatagtcgcagctactcgggaggctgaggcaggagaatcccttgaaaccgggaggcggaggttgcagtgagccaaaatcgcgccactgcactccagcccagtcgacagagcaagactctgtctcaaaaaacaaaaacaaaaacaaagaagaaatttagttttaggtttttcagagagctttcaaatttaaatgtccacatcttttgacataacaattcccagtttaagaatttacgttataaaaattctcaaccaggggctgagtgcgatgactcactcagtactcccagcactttgggaggctaaggcaggaggatcacttgaggtcaggagttcagagaccagcctggccaacatggcaaaactccgtctctaccaaaaaatacaaaaattagccgggtgtggtggcacacacctgtaatcccagctgctcaggaggctgaagcatgagaatcccttgaacccggcaggtggaggtttcagtgagcagagatcgcgccactgcactccagcctgggcgagaccaagaccctgtttcaaaaaaaaaaaaattttttttaaacttctcaacaagaagtctgatggcatacacgtaggtacacttgaataaagttactatgaaaaggatggctaaattattgcacacctatgctgaacaatgcatctgttggttacaaaagagaactatttgtacctacattgaagattcttcaggatacattatttagtaaaagcacaaattataaacagtatgatttcattactatattcaaagatgtctgtggacacatgcatagagcttctagaaaatatattcagcaacgagtgtaagcaagccctgggaactactagagagagtgaggattgaaaaacattttccacattttatgtattttgaattaatctgaatgtgcacatatgtaaaaattatcaacctgtttaatatttatacaatctgttgtatctatgttgtatctgaacaaaaaaggtaatacatgctcattgtaaattaaaaacacaccacctgcagattattacttgagtccacatcccaaaagagaacaaagatcttccatgtttctgttatcaccatcaaatctatttacatccatccagcttccccatctgaatctcaaggagaaaaatacaacggcttccattggaatgactactgggtgacgttgtattcatcctttacacacattgtccaacaggatcctatgaagcatcatgtccattctaacttcccaagacctcaaattcctcatcctcaagctacagcatgcatttagtaagtggagctggaaatcaagcccagatctagacctcatatcccacaaaacaagcccagatctagacctcatatcccacatcctcctggcttttcccttcagttcaacaaagacacatgtggcaagcaaccagtctcctcaccgagaggtttcagcatagtttctccttcctactctcctgttcctcagcagtatctcacattcaagacatttttttctgcatgtcagggtcatacaaaacttgctaacaagctgagacagacagacaccgtggactccactccagatacctctacctcttgcaatctaagaacatatccccaggaaccacaatcagcctcctgagacaaagccgtgacatctacctccccatgccctctgctctaacctcctatctctttaggcccctctccaacttctccgcaagccacttatattaagatgaagctactaaaaaacacattgaaacaaaaaaagtctcatttttctgtcttaaaacaggatatccatgtttttattctacaataagccctggggcacagactacctgtatactagtctttttcctaaataaagaagataaatcaacccttcaaaaaagccaaacaggatttctgtacttagagaaggcaagaaataggacatctctgctctgacttgccactgcaaacatgattgggctcctgtgcaagctactttgaggatttggacaacttaaatgggagggatgaagtcaggcagagttgcagcaggtggcaatgggttcccatgattatctggagggccttaggcaggttgcttctcccagggttctatggagaatcctttggtaaagcatctactgtgctatctcatttttattagttttcctttcttataatatttaaatacatcctggaagtagtactctattgatcaaaggacttgcatagacagcagaaaagtctcgaaaggagttattcagaacaagtcccctatctcaaaatcaactgatctaacatatcacccagtttttgattaatagttttggtcactattgtgaccaaagacaggattcataattggggaaacatgctactttaccaaggaccagatttttttaaatgtaaaaatgagggaatttagctcctcccaaaagatttcttctatttcttttagcaaaagtttaatgaacaaaatggaaggaatacttaatttatgccagtgccctaaaataaccaggtaaaggtattttaaacctggctcatgatatccataaacgttttggccaacagtttcaacctctgcttgtcaaatcacgcatttagaccaccatttggaagaactggacttggggccaggtgcggtgactcaagcctgtaattccagcactttgggaggccgaggtgggcaaatcacaaggtcaggagttcgagaccagcctggccaacatggtgaaaccccatctctactaaaaatacaaaaattagctgggtgtggtggtgtgcgcctgtaatctcagttactcgggaggctgaggcaggagaatcacttgaacctgagaggaggaggttgcagtgagctgagatcataccattgcacttcagcctgggcaacaaagtgagattctgactcgaaaaaagaagaagaactggacttggtctacactcttttggaacctaagataggttcagacaattttcccaatgttatgttaataagaaagcagaatgaatttgtaagaaagtgaaggccaggcacagtagttcacgtctgtaatcccagcactttgggaggccaaagtgggaggaccgcttgagccaaggagttcaagactaacctaagtaacacagcaagacatcgtctctactaaaaattaaaaaaaaaattagccagacgaggaggcatgtgcctgtaggtgcctgtagtctacacctgtgatcactgcactccagcctgggcaaccgtgcgagaccctgcctcaaaaaaaaaaaaaaaaaacaaaaacgaaagtgagctcacactcaccagaaatgttaaaaaagtgcaagagtagatcaactggccaggagcggtagtcccagcactttgggaggctgaggtgggcagattacctgaagttatgagttcaagaccaacctggctaacatggtgaaaccctgtctctactaaatatacaaaaaaaaatcagccaggcatggtggcgggtgcctgtaatcccagctattcaagaggctgaagcaggagaatcacttgaactcaggaggcagaggttgcaagtgagccaagatcgccactgcactccagcctgggtgacaagagtgaaactccatctcaaaaaaaaaaaaagagtagatcaatcgtcatttgtcacagacaagccttgtccattgagtcagaggatctactgaggagattcttccatctctaacatatacataagtactcagatatttctagaaactaagaaaatgccaggcacagtggctcacgcctgtaatcccaacactttgggaggccgagacaggtggatcacctgaggtcaggggttcaagaccattctggccaacatggtgaaaccctgcctctactaaaaactacaaaaatcaactgggcatggtggtgcgcacctgtagtcccagctacttgggaggctgtggcaggaggacctcttgaacccgggaggcggaggctgcagtgagccaagatcgcaccactgtactccagcctgtcaacagagcaagattctatctcaaataaataaataaataaaaaactaagaaagtgaacaaaaattgaataaatgaattctgaaagaaaggttacatcccaggttgctccaaaatttgtaaatcgttctccttctatttacagcagagccaggccgagatttaacaccaccctcactcacttattcatccatctacatcactctcggtggtattctacacagctgattacaccctccttctccacaggctttcttcatttatctcccagaaacagtttgccctgcttgctttcttctactttactgtccttcctcaccctcctttgctggtctttccttcatcctacagccataggctcagtcccttgatgatcatgtccaattccatggtttcaaatgccacaagctaatgaagtctccaaatgtcacttctatgtcccatctccccctgagctccaaattgatatatctgcctactaaccttcttcacttaaatttctagtaagtattagaaacaccatatcaaaaccaaagttcctattttctacccaagaatctgctcctctcccaatattctccattttggtaaatggcaccatcttccacccagttgctctggccaaaaaatcttgcaattcttcacttttctgatactcctcagctaatccatcagcaaatcctgttggctgttccttacagctatacagagaatagccactactcattacctccaaagctagtaacatatcatctcctgccggaatattacaactgtgctaaatgcaattttcaggtattttctgttgcaagcattttgaaaccactactccacccttccttcaatttgtggaagatgacatacaaagatagccaccatcaattcctctctcggtacatgcatgccactctaccaactaaagatggagtctatttccatatctcccctgaatctgagctagcctgatgacttgccttaatcaatagaatgtgacagaagtaatgtgccaattctgagcccagcctttaagaagactagcagcttccattttcacttagggtaagatcagtcaactctgccaggaaaaaaaaactccagcttcttctgaacaataaggtatcatttggagaaaggttacaaggacggccagttacatcagcaaagattccctggtccttttagcccagtttagtaatggacctgagtggcacatgtggatcagaaaccaccacctaacagacacagaatgagaaagaataaattgctctgagccactaagttttggggtggtttgcttatgcagcaatagataactgatataccataaccacaatagaatcagctccctcaacaactaataataatgcaataatgccagacattctaaagacttaggctcctttcagcttatagttcaatagattcctctaagaatatttctttttttttttttttgagacggagtcttgctctgtcacccaggctggagtgcagtagcgcgatctcagctcactgtaagctccgcctcccaggttcacgccattctcctgcctcagcctaccgcgtagctgggactaaaggcgaccgccaccacgcccggttaatttttttgtatttttagtagagacggggtttcaccgtgttagccaggatggtctcgatctcctgacctcgtgatccacccacctcggcctcccaaagtgctgggattacaggtgtgagccacctcgcctggcccaaggatatttctacaataactttaaactatttcctaatcaagttatatggtctcaggataattctctaaaatatctatagtttatgtactacaaagtagtccccttcagggcaacaaaattcacagaatatgtcaatatttagaactgtgtttatttaccaatactgaatacttgccaaacagcaatttcagaccatgatacattacacccttaattttaatggaacactcaaaactatgtatgcttgccatcagccttcaagcaaaattctggcaatccaagccaatttgtaacatcagatttatggggctgagatcttaactaagaataccaatcctaccccttggtcattgctaccacactgccacctcctgtcttatgactctggaagcttgaatcagaggcaacagttgataaaggaaactcagctaagaatagcacagctaaccatctcgtctttccgcctctccttcctcccagaccaaaccaaccaccagagttactgaatggataactcacaccttccaaaaattagttattgctagaaaagttgctgcctggatgctgctgctaaaaacaattataatggagtcacttcaaatacatgaaggtagtttgacagcttcactttaatacaaaatcccaatcctataaccacacattaactaaacttgtgtcgctcataatagtttcaaagcgtggcaaagatcatttcccccttgctaactgcatgaaagaggtacacaggcaaaaacaacagagctacagaaaaaaaatttaagtcaagctccttacaggaaaaaccccagatctctgtaattccaaaagatatttttaagccttagctgataacctatttattttgagcacaatggcaaaacctcagaacaaaatactatataccccttgtagtttatcataatggcatctggcctgaaaagagaatgtaactgatcacacaaatcaaaaggaaagccagaaacagaagccaagattctcgatttccactggctcctggcacatgtcatgtttccgtaacatcttcctcagagttactgtggacagccatacagtagaagccacttatcaacatgcatctaatttttttaaactcttattaaaaccaaagtaagaaatctttcaagatctctgaatttgttttgagaaaatatgaaattaggaaaaaaaatctttttagctacaaccacttaggcaatcccacgctgatcttaaactgagcacttgaaagataacctagtttataattatttaaccagccaagaaagtttcctaacattcagaacctcaagtctctgcatgtgtgagaaactttcccgaatcgcaagattcacctaagccatacactgataaggaaggagtaccactgctattcgtacctgtgtttaaacgttctacattaaaaacagcttttgctgtcctaagactttgaagtcggaggcagcattgaaggatcatgtgccctggctaatgggcacgttgctggtcatgacactagcctattctatccttaacacctattaaaatgcaacactagcttttaaatagccacttaaagtaagttacatttaaaaccccgatgacttttataagttctatccaatttacattttaaacacaagactaatatggaaataagttcttcactttcttttttgcattttcccccacttttactgtggtaaatacacataaaatttaccatcttaatcacttttaagagtacaattcaatggtgttaaatacattcatagtgttgggcaactatcactgttttcttttttaaggaaacaaacaaaaaacaacgtttgagcttaggcaccacagtctgttttaaaagatcttactctaaattagccaggcatggtggcgcatgcctgtaatcccagctactaggagggctgaggcagaaggatcgcttgaacctgggaggcagaggttgcagtgagccgagatcgtgccactgcactccagcctgggcaacagagagagactccatcttaaaaaaaaataaataaataaaaataaaaataaaaataaaaataaaaatagaaaaaatcctaccctgaaaggaagaaaaaggtaaaggatcctgcctagaaaaatattaactataatatcctattatttttttctcctttcttcaaatgtatttttcctacacataatcctaaacaatgccaaccgctaaatcatgaggaagtttaataaaaatatgcttaggttcttcatcacataggaggcagcaacaacaacaaaaaggttaggttctaaaaaactgaacatatgaaaaattattttcgtaattttaaaaagtaatggaaattgaactaaaaccaccatcctctcagttccccagtgtcagcaattttcctcttccctctcccatgcccaacagcccacaacataacaaaaaaggacatcagtgctatttacataatcacataggggcacaaacaaggccccacaggataccagcagctcttccaaccaaacacagctacaacatttccaagtaccaactattttccacacctacccttacttccaaggtggagggaaaaaagttgagcctatacttcggagtcaaagtcttcatgttctgtatcttttatatttagaatagagagtgcaacactatcacagatatccaatgcaatcttctctttagtccagctgcaggagacttcaatgtctgtaaagtaactgctataatcttccccaactgaggggtatctgaatgcagaaaagccacattccttccacattcccttgagacctcagtaattgggagctaagcttggtctgaaccaaattcaaccttactacttcctgaaagggtccccccccaagctccactggaagtcaaagccaggccagcctgccaagcctccaatcacctcctgggcctgctcccctgtttagtcagtgcaagcccattcatccatctcagcgtgcattctccagcaccaggttcctgacatgccttgtatatcaagtacaaaggtcactgctgcacatgtgggtgtgcctgcctcagatgcccacatgatgatgggatggaatgaaatgactgctaagcagaaagaactccaccctaaagtccagcaggcttggcaaggattggtttgtggcattcaactatcagagcaacccccatcagtcagtacaacctcttgaccttcccttaggtgctgggcatgtggtcaccctgatgccttctctgcccgcttccagagcctatgaaaatggtggaacagtccagatataggaaactgcatcacagctccaagggtcagttaaaataactgtaatatagatttccagaggcagagaaaaaaggtttttttttttttttgaggtagagtttcacgctcttgttcaggctggagtgaagtggcacgatggctcactgcaacctccagctccccagttcaagcaattctcctgcctcagcctcccgagtagctgggtgggattacaggcacctgctaccatgcccagctaatttttgtatttttagtagagatggggtttcaccatgttgaccaggctggtctcgaactcctgacctcaggcgatccacccaccttggcctcccaaagtgctgggattacaggcgtgagccactgcgcccagccaaaggctctacttttaagacatttcaacacaagcaaggaacatgattgttctatcagtaaaaacaacctccaatgttctcatccctgtttactttgttagtaagatagtactgtatcatttaaaatcctgagcattttaatgaacttgaaaattcaatttacattgttaaaaatgaacttgaaaaatgaacttgaaaatttaaatctacattgttaataaactgaagatacattgataaatacttgctgtcactggtgacatcttaccttatgtgctttcctaaagaggaactcctgtttattataaagtaacaagtaactaagtatatatatgcttttggactaagcaaaagcctttaagaataaaacaggcagttgttaacaggtaatgtttttaaattaatcccctacacctggggagaaattcccatcggttagcaaaagaaaagcagcaggggaaggcacagtaatctgtatttacatgtagctcgatgaattgtaaaaatccaaaacatttcatttttaaatttagaaactctctcaaatgttaaaatgccagtccttgaggcacaaccatttgcttatttattcaacattttaacaaaattaagacatactgaccaaacataataacaattagaatttgtaaaatgggcttatgtttttttcctaaccaattcaggctatggctttaagcttctttttacgggaatatgacttctccctcgattttcaattcttgttaaaccaagctcaatttatatgaaaatcatgtgacccctaccaaaattcccaactagaactaaatctatcaggtcactcaaatccctttcaattatcttaatgaaatttaagtatgagaacaagaaaaatccaaaccaactcatccttaaaaacaagatttgtgaaaatgctttgcctgggaagagagctgaaatctacacaggcatacagatgagatgttttgtagccatctatttctgcacagcaccagagaaatgcatagcaaaccctcctgctctccagcacacactctctcaccaatatctaaccagatacacgcagccctgatttaaattaactttcagcttattatttggctcaggttgggagttggggggatgggagaggggcaggcagaaaccctaaccccaccatgcaaaatccagaaaggcttagaggcccaccccggtgcgactgggagggagcagtgcctttccaattgcagttagagccggaatctatggtgtgagttggctgaaggttttaaaaaacaaaacaaaacaaaaaaatagagccggaatccggcctgctctagcgaaaggaaaggagtctccactgctccataaggcttcataagaaaaagaaaaagggaaagagccatgtctccaaaatgcttcagaggctaaaacagtctataaacattctgtaaagcgacatactacacacatgatctcggagacgagaaatccccgtccttaagtagtacgaatcttcctgtcttcatcttttggtggttgtaagcaaaaatgtacccaggaggagtggggtggaaagcggggagacaaaggtgctgactgcaggaacctgtagaacttcggagtgactcaaaggcacttctgggccagagaggccccagcgtttacgcacgcgttccaatacccctggcgagctcacagggcagaggcaaattcctctccactcggccgcgcccacggcctcccaaccccggacagagaaggaaaggagggacccccgcgtgtccgcagctgctttcgcctctcctgctcctggaggggtgggggaatcatccgctgcttcccaagccctgcaaaccccccaaactgcttgttgggacccatttcccgtaggagcaatttgacccgctcggaccgaggacattcagctgtgagctttcgagagattttgtaaccaataaccataatcccgcggcagaggccacagaaaagctttcaattcctgcccagcatcatcaacacacacacccccgccataaacttaaaagcaaggattaaagaccggaacaccacgccacacggcagggggtaagcaccagaggacaagaagttctcagctgagtctctccacccaataacggagtgagaacagaatcggggcaaacagaagcagcagctcacctttgcctttttgggaccgagtgctcaacttctatgggtttcccgtgcagttctattttacctgcggacacacaagaagtgagacggtcggccgagttcagcggctctccctgcccgaagacccgcacagcccaagcggcgacacaaatggcctcctgaggccctcgaagggcccccgaggcccggacgcggctccaggcggagggagaagccgaccccctcgagcggcgtgggcatttaactcgcagatggttggggagcagggtccgctggcgggcccactacttgggtatcagtccagtctccaagcctcccccacccacccctgggggccaccaacaccacgaggcccgcaagagggacgcggcccaccctctcaccgccctggacacgctccacagggcagactcggggcagggggctcccctggctttcttcaggagggggcgccctggccctgccctctgcttcagcccagacccgccgggaacactcagcggtgggcttgaggaagacagggagtggcgagaaagggtcggggacggcaggggagaccacgaacgggagaactggcagaggcgcagctcggcacaggctgaaccaggcgcgaaggacggcgaggcgcccgcaccacgtctgaattgattaaaagggaagccgaaaggcacggggctcccatggggaccccaacgcagccttccccctgggcgtcctgctccgcccggcaccgtccctcgccctggcggagccatacccggaggccgcagccccgcgccagggcccggagagcggcgggcggccggtgcgtggcggcgactcccttccaggcgaccagccgcccccgcccacctgcccctatcgctcgtcggaccaggggaggtggaacggggaaaccgggcacacactctctcctcccacagggtggggaggaagcgcggggccgcctgtgcgaggcaccagcctcgcggtctcactcggcagcacggtcgaggccactttccgttctccacggccgggggtttcggggcgcagcacagacagcgccgtaaataacgaccgaggaaagcaggaaggaacgaggcacaggcgggcattctagctcggcccccgaggcccagcgtgccggggcctggagcacgcgcctgggcccgggcggggcgccgggggagcgcgcctcccccagccccgcgccccccttagccagcgccggggctttcttgacagcgcgttcgccctcacccagcaaaccccggccggggaagcagagccgcgggccggagtgggagccggagctgaggagagccccggcccccacgcgcgtgggtgtgggcgctcaggcctcacccccgctcccccagcgcgccgggcctggggcccgcggagccacccggtgggcctgggcgggcggtgcagggctggggcgagagcccgggtggggccaggcccgggcccacctgaaagcgcctcgatggccttgagggcccagctctcgtccgggcagtccacgaacgcgtagccagtcttcaccaggaagggtcccgacaccgggatcttggcgtccttgaagatactttctaggtccgagggggcggcgttctcgctgaggtttccgatatacagtttgttcattgtgaagagtggttgtttaaaaaaaaataacgagaaaaaacgaaaaattaaaaccacccacggtgatggatggatccagctggttttgttcccctcgtcttctcgcctttaaaatacacaaacacagtaagaaccaagcacaagaacgaggagtgaaaaatcagatccgaggcttgttttttccttgtctagatgtgttttaaaagagaaagaaaagaaaaagcctagctacaacccaaacgcatccaccagtcttcctaagtcttaggaggaggcgggattagcaagagaaaggaggaggaggaggggaaaaaactactttttgtctcttccttcccaacccctttggcttcggccagcggactgtgaaaatatcacactacgtgaggcaggcgccgcctccccataaaaaacccagaagggtgactggcaggagggaggggagaggaggaggaggaggagggaggaaggcgcaggaggcggaaaaaatccgctccgagtgtccggctttttgaatgagccacgtgttcaaactacaaatcaacgtctcacgtgaggaatcccagagcctcaattagagtgggtttcggagaaaaaagcgagcgagaggaagagggggaggggaaacgagattgggagagggactctgagaagggggaggaggaagaaggaaaatgctaaaggaaccgcagccggcaccaagcggggcgctgacggtcacaactcgagtttgtaaagggttatctggtctgggcggatcctgggagggagggctggaatattgatttttttttttttaatgaggaaatgggcagaggtactaacaggcagttcctcagcgctagttaccgtagttttaatcattcgatttttcaaaataggttattaacaacaaaaccagagtcacaatcccgaactcgcctggtggctttaatggcattagaagtgtaaccccagcaaagccgcaggcacgtttctaaggctggcatggacggaaatgctgcgaggaggggtgggggagtgggtgaggggggcagggggtgggggcaagacaggcgggcgacgcgccccaccccgtgcgcccttctcgggccctgggcaccgcgcgagtgggggcggcccggccccggagtggtgggggatgggatcccgcagcgtcctgggcgggtgtctgggcgacacctcctccgcctccgcctgcgctcgcggtggctctcggcttcgcgtttgccattggttgcgcgattcagaaaaggctccaggataaatgaggccgggggcgggcttggccactggtgggggaggggagtgcaggggcggaggtttctggctaggggctggggtcgtcgggggcctgggccgctggaggagagaagtcaaagtgggaaaagtcggtaaagggaaaccctctcttcctgtagtttttaaagggggaggagtggagtaggctggtacttttatttaagtaattttagttggagaacttgagacttaaaactggaagaccgtcgtgcattacccctaggtggtattcgcatttgaaaaattgttcgagtctctttctgcctcttttctgcctggatttggccatgagagccatacataattttctctatatgtaatgagtacaatggtggttgtcgggggaggatttgggcccggtggagccttgtgggccaacaaaatgtgaactggagacgagcaatacggaaacgaaggcagtgctggggttctagtggaatctccaactgtcgtttaaagattgt

SEQ ID NO: 278 - DNA, 20919 bp, Homo sapiens
  source 1..20919: mol_type = genomic DNA
ctggtgcactggaggagctctgcaaatgtgtgatgggtgggtttatgcatggagaaaagaggggagactgttcccccactccctagtactcaggatttttactcttccctcgagaatcaaccgttccctaatataggaggggagatgtaggcatgaggaagagacagccacagtgaaagtcaacacagggaagtctgcctccttggacccacgcacttctcactgctggatgcaatcgaggctgaactgaaaaggagccctggccgtaaacgagttcacgttccaggagagcggtcagccccagagagccagagcgtgggcaagtgttggtgtccatctcagccctgggcactgggcttccacgttctgaattcattaaactgagacaccagagcacctggctttcccttaattaattaaaatatcatggaataatcattgtctgatgtaatgttcaagaagccctcgtaaaggctgggaaggaggaaattcattagcggagacttttactgtcgctggatctgccgttcttattcatttctcctgcaccatccgtccctggaggagagggcaggacagtgtttttaaagatgttggaattaatttcaccataaaacctgaaagaaaaaaaaatccaccttaactaaaaactagccttatttgtgtttaagggggaaagcagatacatttgggattgaacatgggctgtggaattgtcttcctcaagcccagctgacaacagagacagagattcagtctgtccactgcttacggcaacaagttcaacctcctctgtctgcattgaggggtgttgccccaaactactacccgcccaccaccatagctctgagcagcagcaactggccattcctccctgttcacaaactacactgcatttttctaccccgactcctttttgcatgctgtttccttagcctggaatcccccacacccactcctgccagttcaaatgcctgcctcctcttctgggaagtcttccttgatctccctctgctctaaccacaaagcagacaccatatgctgccagggatggtgacctcatcccacccatgtctccactggagtctgagttcaggacctgattctacctactttcatatgggaggaatccagatgattccaaacatatgactttcggcatcttgtacctgtctggcacctggagaatgctactgtgtgtgtgggaggggacagagcactatctcagcaagtgaattaagtactagaatgcgtacacggcaggacacacatagtcaagggcagtagtgtaagatgattagggctggttaaaaatttcgggcaaggtgaacggtggggctgcgatcgcaaccaggcgtgggaggtaaggaggatctagactaagtagctgaagtgggcatgcagaaggaaggacaggaggcatgagggatgataaaggaataccagtgggacctgcacccacctatacagcattcctacaacaaagacaccacaaagactgtccttaaaaacatttatttttttcagggtgcaggggtcgtgacatcatgacatctacaaaaacggtagaaaaacccaggtttggtgcggggagtgggggcattgtaattacgtctccaaatgctaacagctgtggcagcgcatgctctcttagcctctgaagaggtctctgggcgctcacacttgaaaaaccatgaggttggaacaatcatgttaatgcgcctttttggttttggtgaaaatttcagacagtgtgacattaattatttgtctttgcacagaatgatgatgctaaagccagccccatacagtcctgatgctcagtacttccagcatgggctctgtccaccctgctctctgggtctacatccagcccttcagttttcactaggcaaatctgaggtgagtcaactgagtttgcaaaatgtgcttattagcaggtgtgggatgttctactaccttcttcagagccacagcattcctgttccttcccacatcatttcactaagggtctgaccaactcatctcccaaccattcaagacacaggagaattaactgcaggccttcacacatggaagtcagtcacagtgcgtggagaagggaggggcgggaggggctgagtgaggagtggatgtgagcaggtcccctggcagctccaaaccccagtagacaagaacagcttccagtgccatccatttcaattctcatcttttgttttcaaagagagcttccagtgttttaaagtttgaaaaccactcatctagttttattccctttttactcaaataaggacactgaggcacagaaagtgaaggagacttgctcagggtcacacagcgagccggggattaatatgcaaatggatctcatgtttccagaatcccaggccagtctccttctgctgcatagtacagaaggtgatgccatcccaatatattagacatggaatggcaggcttacaggcggaaagttcacttccaacaaggactccaaaatgtaatgcacaatgtgagcggtgtgaaagtgtgccttaaaagttgggatgagtcttgataagagtccctgaagcctgtggattggcaacatctgcctttacatagttttgagatgaccctgagtagcagcaccgtggagtagagaggggaccaaggagggccaggtgccctgagctctgctcctctttcagaggccttcaggccttgggcaagtagcttctcctctcagagcctggtttcttcatctgctaaaggcagggacattaacacctgtcctgccccatctcccagagttgggatcaagctttatgaacttaaaggactgtgcatagtaagggctctcaattcttattttaaaattgtaatcacctaaggatctatttttttaagataagatagcaaatattctcctttcttttttcattaaaaaagaaaaaaaagagagccttactcttgggtgaggtcaaaatgtttgtaggtaaaatatattctactacaatctaattccacagtctggagataacacctgacccctttttttacaatttgatcgtcagaagcctggtatccaccgcttctaaccacctgtttagagaatgctaggctaggccaagcacagtggctgatgcctataatcccagcactttgggaggccaaggcaggaggatcatttgagcataggaatttgagaccagcctgggcggcaacatagggagaccctgtctctacaaaaaaaaaaaaaaaaaaaaaaaaaatagctgggtgtggtggggcatgcctgtggtcccagctactcaggaggctgaggtggaacgatcactcgagcccagaaagtggaggttgcagtgagccatgatcacgccactgcactccagcctgggtgatagagcgagaccctgtctcaaaataaaattttaaaaaagagaatgctaggctaacaaatggatgctctggtctccaaagacccagccaaggcgctcctgagtctggtaaagcatcccacctaaaactaaatctccttcaaagggaaaaagttaggaatagaagagctacagccagctgtccacacgttggggtaaagcaatggaatttgtttctgagggaataccattttagaaagaacactaagaccacacttcctgttattttcccaaaaggccatcttaatctaggatggcagggctaaaagggacattgataacatccagttaaaatgccatactcacagatgaagggaccagggcccagagaggggaagggatctgttcaggtcacacagcaagttacagtcaggcagaggacagctgggaccctcatccctccttctacaacacacactaagtcacagagcaccactaataggtcatagacaaatgaggtaaagagtcacagctgacacgagccctttcgaaattgcaaacatgccgttctgtgatctccctggaagagaataattacaaaaagacttctcatggaacaattcatttcaaaagtataaaaaagccacatgcaaatccgtttctcactgtttgccctgctaaaaactacatctgcatacagatctagtttgcatctaatttttaaaaacacacaaaaggggtcatctacacacacaggttttccaactcttcatgaagcacaaagatccgttatttgacttttccatcatcccatgatcaatgtttctaagaccctaggaagaaaaggagagaaagaattagagaacgtaagcctgctccgttacaatcaactatgtgttacatggaaggtgggggaaatgatccttcacttcgaatctctccccagcaggaaatggtgccagtggagagtgaagggccctgtggagtcccaagaagtacttttaagaccaaaaggtggacgtttcaaagcagcagactccagcttaataagatcttttcaaccattggaaaatccacagatggctctcagtggtagtgagctctgtatccctggaggtatgtaagccagagctggcaatactgtgtgtcacagaaggaactcaagacctaggcagcagtgatgctcttaaaattccacaatttttcatggtatccttttgatgtattcacaacccagaatcatttctgcctcaaaatatacgtgtatttgaaaattatagatatatatatttaaaactggaaacatatctatataaaacaagtcacatatcatcaggaagacaattttaagacccaatctcctaactctttgttgaattcctatttcacagttttacattttcatatttttctccccatttctagggcctctaactactcacgtacacccatccttcaatcctcatgccacctcctcgatgattcttccttcattttccccagttctaagctgcttttcatgccttaatatctcctcccattcccttacatcgcactccttgtattataattatgtccactttttgtttttctgtgatcccctacagaccagaagtaaggccttgcacacagaaggtgtgcaacagtagtggctgaaagaataatataactaaaaccatggcaaaatccccctgcttttgagaaaccctatcagacttgtttctaatttttcctgttctattaagcacctgttgatcagccttggtaatggtgcctgttcaccactgctcccccattcctgtaagaggatcgtgcaggccaggcacggtggctcacgcctgtaatcccagtactttgggatgccaaggcgggcggatcatgaagtcgggagatcaagaccatcctggctaacacggtgaaaccccgtctctactaaaaatacaaaaaaattagccaggtgtggtggcgggtgcctgtagtcccagctactcgggaggctgaggcaggagagtggcgtgaacccaggaggcagagcttgcagtgagccgagatcgcaccactgcactccagcctgggtgacagagtgagactctgtctcaaaaaaaaaaaaaaaaaatgattggtctgtaaatgggcggggcacacatcacatccgagcagaaactttaaatgcaatggtgtgtgcagcctggccacagaacggacatgttccacactggagctgttcctccagctgggtcctgaatgaggggacacatggggcagggccacagccagctcacagctataacatggaacatgagcaagtgatcaacgtctgtggctgtgaaccagcaagattttgggatttttatgagcaaaagctggcttataaagtgatccctttcccgaattcccagttcacctgtaggcaaggaacagatgcaaccccagctgtcacctgtgtgactacagactaggaggccttgaccagaggggatgcagagattctctctgcccctacccacaaggagatgtgttgcaaagcagcacacagtgctgaggacaggaaggcaaggcctgagccccaggaaggaagctcaggtgtcctgaacaaggaagagctccaggaacacacaaaggaagctcaggcatcttctttgtgggaacattttcacatggacgctgtcacaatgacactgtctgctacctctctcagtgctctttctagaagaatacagaggaaatattccctccagccccaaaacacaactggtcttttcatctcatggacacacatcatgttcacagctcttgtctttgcatgctaagaagctcagagggagatgtgtgcagaatataccagggattctactgctcatctaagtatgtccctactcttcttttgctctttccctggtttcctccatttacgtatttttcttcttttttttacaggtcttataagccacctcaaatatctcataacatgggtgtaaaatactgaaaatgacttagaacatgtacatttctccatcacatgcggtcatcgggagctgggaagtggaagctcctgtatttactcagatctagaaccgtcactgtgctgtgggactcagcctctcccaccatgttggctgcatggcactggtacacaccctcatcctcctttcgcagggggttgatctagaaatacaacaggcaagtttatacagttatataaggaacagcaaaatgacttccttagttagttcttaatgataagtctgcacacttcctccttttcagaataaggtaaaacttgctctatttctctccttgcattggctgccaaggagcacgcaggtaaatttccttcccagggaccctcttgaaaggcacgctccctattgtggctctcatctgaatgattcctccgcacacctgccttttactgtgagctacctggtcttttgtattaaaggtgcaaggtataggttatttggaaaacacctcaagttaaaagaagaacaaaaatctactgaccaaagaatgatccagaaagtattccctataggggcagcctctacaaaataccaccagagataacctcttttccctgtcttttctcctaagaaaatagaggaatgtgcttgatttgaaaaaaccgcacagccaattgcattcccaatctctcagctgggtggagaagagtcaccaagcctcccagagctgtgggtggaatgaggaggttgtccttagggagcaccccaaggatgttcacagccaggtccataaccagctcgcgtcttttttgctttctcgttacaaccaaccgcttccatcaattacaaatcatcctaccgaccacgcgctggtgtacgcacatcagctcgttttaaactcatgccagtcgtgggggaagggtgagcattatggtcttctttttacaggagactcacaggtaaatcacagactgccagggccacaaaggccctcagaggtctttcagtttgaagccctctttcaacaacagtggaaatggaggctcagaagggtacagtgacgacccaacatggacccctatctcctcattccatcactctttcaaacatgtggcattcttcatcttggtaaaagtgctgcgagtggcaggaaagagctctggaggaggactcgaatgtgccaccttctacctttaccagcgggtgaccttaggcaggtgtactagttccttgggctgctgtaacaaatcgccacaagctgagtgccttaaaacaaacacatttcttttctacagttttggaggtcagaggcccaaagggggctaagatcaaggtgccggcagggctgcattctttctgaaggctctcaggagactcattttcttgccttctccagttcctagtggatgctggcactccttggctgtggccctttccaacatcatcaaagccagaaatggtgggtcaagtcctcctcacatcgaatcacttcagtctgcctctgactcttctgtttccctcttccacacttaaagacccacctttaaattggcccacccggataatccaggctaatctccttatcttaaatctccttatctcagctgtttagcaaccacaacctccctcccaccaccttgccatgtaacatcgtacggttctgggggtgaggacgtggtggacatcactgtggggccatcactctgcccctggcagcagaacacgtatgttcccagcagatctgaaacctgccctgcctgcctcacagttactggaggggccagtgagaaatgggtaagaacagctttgaaacatgtaatgtgttgtagaaatataaaggatggtttataatggtcagtcaataatatccaataatcctaaacactcaccaaaatccaggccgtggcctcatggtcagaagggccccctcgcacttggacagctatattgacatggtccccaggcagctcctccagtgcttgggtgccctcaggggacttcgtgacctacaggggacaggaatgccaggagggggcttagaaaaagcaattctggataaagaccatcccataggcttccttgccctcctccttcctcctcctcccactgactcaaaaacggaaaccctagcactgctcatgcctatgcaaatgacatcagtcattttttaaacctacttgtacatatagacagcacgctctgccagacagcaaagacccgaacatcaccaccatcccacagaaagattcagaatttcaacgcctgtctcagggctattgacattaaggggacaacattcgctgtgatccttgccggtctctcaaaaactggtctttagaagatttggttttggaataggactgagtcttctgccaccagccaggtctgtctgaaacacagccccgaagtgaagcaggatacacacacacatggccaccgcagctgaagcagactgggtaaaagcacagctttctgggtccctaagtggccaagggtgtaagtggcacaggaagggttgcaatgttcccttccaaggggagaggtttggggtagaagtttcgaggcagaggagtggtacagatgatatcttttcttcatcctctggcccacctataaaggcatatatatataaacacacttaaaagaaaaacatttttaccactcacgtctgtttctccctctttctcacacacacacacacacacacacacacacacgagatgcatgagttcttggacagaaatacctttctccacgtgatgactggggtaggcacagccctcacttcacaggacaggcccacctgcgccccggtgacgttgtgaacacttcggggaggaacgacgaccacaggagctaggaggaggagacaaggagacgcagcctttaccctgcagggttccaagcaacccacctctaaattcccctgccgcggagagcccgctgtgatgtcctgacatgaggggagcggcacatcacgcttgggcaggaatcctaaaagagagatttcctcagacctggaaagctgccgaccgatctcctgatccaatgattgttttaccaatgggaaagcaggggtccagaggggaagggcaacttcccaaattcccccagcaccatctgtggcagagcttgggcctcagtgctccctcccagggtccgttccaggctccggctgccatctgctatagctcaaccaggaaaaacggcagccgactcctagaggggctggtgtcacgccaccaacggcagagtcttctaacagatgggcttttctccttccacgtggagggtgttaggaagaagaatgccaggaagaacagctgcacacaccctggagctcaatcccctgcggtccattcaagatgcccatttgcatgcacagggtaaagactccccagggctcccccactccctctgcctccccatccccagaagccgacccaagcctgggcaaatcagggaatcagggaaatgtggttctagactgccagaacatgacggagaggagagggagggtatgggctccctggacaggacccagtgttagatgtttcaaactcctactccacactctgccttcctccccatgcctggcatctgctctgctcacactgggctggaataatcaaggccaggcgtttctacctgctctcacctgcattggacagcaactcagccaccctggcatccagcaccacagcgtgttgggcaacgtgcagtgtagaggcctggccagggaatgctcccacccagctgtcatctataaggtggggatcacacccctgcttcctagggcggtcaggctgatctaaccatggaatgagtgaaaagtgtaagttaatgtgatatgcaagtgagggccaggagcaaaaggatgactggatgaacaaacacatgagaaatcaaggaacaaacatgttcatttccaggccatcaaactgcagagtctagaactcctagggctttgcctggtgactcaaggacagccctgttgttctccacaagactgcacctggataaggctgcaatacaaaaggagagcaaagggaggagacagaaggcaggaggaaggaggtgacggacagcgtcgcatcacaccccaatgctcaggaggatcagggtgcagaaaggagactagtttggcccctccagacagactgggaagcagaccctgtcaagccagtgccaaaaaatctctggaaaatcgccttagagccacagtctcaaactagagaggctctttagcatcctgattctctgtgattctgtgcctgaccacgtatgacatgctcgcacagcctccatttgcatgccttcagggatggagaactcaccacctacggagccaggccattctgtctttggagggctccactggtaagaaggtgcatcctcacctagagctaaagcctgtaactcccacctgttgatcctggggctgccctctggagccccatagcccctgggtgtcccagcagcccaccagtgagttgaatacagactgccctccccatcccaggctgctttcctccccctctatctgatccacccactcattcagctgtacccatctgagggccctctgaagggtggtgcccaacccatgtgcctgaatgtagccaaagccccgggaaccaagatcctagatgtctaacgttgcctgacagccacagagagccacaacactgagctctccggcaggagccccatctgtgatgacaaagacagtctaatttattcacattgtcccgccagcgcctccccaaccacacaagcgctgggatgccgcctccagggaagcccaaaccagtgctccagtggctcgctgtggtgacagtcagaaagacctggataccaaggggactctcaatcagcctggtttacttttgttcatgtaaagtcatacattttaaatgtgatttcatcaatccctttcaggcctaaatgagtaaaccaataaatcacaattcatctctctctcctcatgtttcagtctgtctctctaacaactacaattaagaaagactgtcttggaaatactgactttgtaactgattttgtggcaaaaaatacaaattcctttacaaaagaagccctgctttttaaagggacgtcaaagcacattaaagggacatttaaatttgtatttatttatttatttatttttaaatttacacaaagcacaattcgttccttctggtgtgcagttctaggttttgacaaatggatacagtcatgtaattaccactatagccaagatacagaacagttgttctgtgacctcaaaaaatgtcatgttgctcatgccataataatccggttctaatttttttttttttttttgaggcagagtctcatgttatcctcagactggaatgaagtggcacaatcatagctcactgtagtcttgaactccagggctcaagcaatcctcctgcctcagcctcttgagtagctgggactacaggcatgcactaccacgcccagataattaaaaaaaatttttttttttgtagagatgggtcttgctatgttgctcaggctggtcttaaactcctggcctctaacaatcctcccatcttggccttccaaagctctgggaatacaggcatgagtcactgtattcccagccctgtttttaattttaacatattttaacatatctgattttaaatttaaaatatttttatccacagtagctctttataatcaataataataacactgttattatgctatcagctagcacagcgctcgctgtgtgctaagcactcctctgcctacaggtattaacttgtttatctctccagcaatctcaccagctgccagatggtggcgctgccctgggttaccgagcattaaagggtgtagtgaggaggctgtgagcccagtgatgtggctccagatcccaagctcttctgaaccactgtgctaacaccatcctgccttttccctagaggacccttccacgtacaccaccctttcatcctcatggcagccctgtgaggtagctgcttccatccccatttcacagatgagaaaaccaagactcagaaaggtaaagtgcccagaggaacagggactcaaacccaggcaccatgattccattcactcccacactggtttctaaagtggaacatttgttatctgtgtggtctccgatccagaataagagatgagttgcttagggattgtgttgggggatccccaagacaactctctggttcaatgatttcctaggaggactaggaggactcacaggactcagcatttagtggtactcaggctgtgatttagtacagtgaaaggattttcccatctggcaaaatcagccaagggaaaaagtcagggttggggaagcaggcccaagatgccaagagccctccccatggagtcacaagcatgtgaaatgctgtctaccagagaagctcaagagggacttggcgcccagggtttttactgggagctggccacagaggcactctctgcctaactgaatacccaaattccacactccgagaaggaaagcaggggttcagcataaaccacattgtttgtacagttcaggcacagtgagccactctcatcaattctgagaagagtggaacccccctgaaatctaagtccccagataccagcccaaggccaaccttgccagcaggcctttctgaggatatggtcgcaggcctgccgtgttagctgttttctatacaacaatgaaacaccccaaacatcacccccagggaacagctcttatgaagataacccataacatgagcaatgtgtccttgacaccagcaggacatttctagtccctactatccccaagggctcattccagcatggcactggagtgctcaacgtcatggctgccaccacaggcaggaaggacagcgtggcaggcaggggtggaagagtccaggttcaaatcctttctctgccacgtcccagtcttggcctcagtgtcttcttctttaaaatgggcacaggaatctattcccttcccagcccactcctcaaaggctgttgtgaggaacaattgcaagaccccttacaaactgtaaaagacctctgcagagggacttgaggactcaggcagggtgtgctgtccttaggcatctcctctaaagctccctgcatgcatgagagcctcctctggccttgggtgagaggcaccagggaccatgactacagccctcactctggggagccaagcacatactcttactgttgccagagccgccacactgccagaggaaccagggctttcctttctgcctgcctttcacaagaatgatgtggcttgcaggagggaggatggcttctagctagcccagtctgtgaatgtggaagcttcatccccctatagctcttccttgctgatacttgtttccttctgcttgtgccagcaatagccctagaattgcacaaatccaaccatccaagggctaaccagcaggtaagacagtcacccagatgcacatggtcacaggaggcagtactgtggggtgagcaaaaacagtaccagagggagactcaaatgcccaggggtctcgctgccaaccacttgagcttgggcaagttgctaatcatttcctttttatctgcaaatgaagatgatgaccgcagcctcgcatccttggggtgaagggagaaaatggatgtgactgtgttattaactgtgtggatctgtacaaatgaaagggatcaatattattattatagtgtgtggtgatttgtccccctacctcgtcaattatatcgatcattgatggctggaatgaaaaaatcttcccaaatccctctgagatttctttaaagttaatggtgctagggaaagaaaggatatcaagtcattccccaggaccccatctgcttgtattaaaaagcacataaccaaagattttaataatcaacacactgaacagccctgataatttatgctaatagtcacgttatgatgtggaacaagaaacagcttaatcctgctccctgcagcctctgcctcagatctcctccctcagcatgaaagggttttgagcacaaacccccttctttgtccctctcacgaagtggcatgcgctgcctctcctggttacctggtaacacacactagcacagacctaggtttctaagtggagctggaatttcaaccaaggtgaattttctaagattcagggtctcaggagctcaccgaagctgccagggctcaatgccctggcgggtgctggccgggaccctgttcctatctaatttatcatttgaaacatgacattaacttgctgtccgtaggaccccaaccctctcccaatgctaacaaatagggtgcacacactgaactatccagcctttaaagtaatgagagcaataataatcatcataatactaaggccataccaccttaccagtgagaagctgaaccaataattcagaatgtatcgaagacccacgtatgaataattcttactgttggaaattgcttttgcatccttcttcttccttctcctcctccccctcctcctcctcctcctcctcctcctccttcttcttcttctttttagacagggtctcactctgtctcctaggcggagtacagtggcatgatcatagctcactgtagcctcgaactcctgggctcaagaaatcctcctgcctcagcctcccaagtagctgggactacaggcacatgccatcatgtccagctagtttttagaattttttgtagagatgggatcttgctgcgttgcccaggctatccttgaactcctggcctcaagcaatccttccacctcagcctcccaaagtgcagaatgaagcttcccccttcggccttgcacccaaggcttgcagtggcctaccccaaactactctggggtgtcatctcctttcccaaccatcctaccaggcctcggccctatgggcccacttgcacacccaccaaagggctcccacctctgagcctcagttcatgctgtgcctcccccttgctagcattgggattctctccccatccttcaaggcttctctcaggagctatagcccagtgctaaatagagggacaagtgacaaaccttgggaaaaacaggaaggtggacccagattgagaaacccccaagattcaaggctggcgggtgcacagcaccttactgatcaggttgctagcggctagctgtgcagcgcccatctgaaaatagcgaggcaggccaggcatggtggcgcacgcctgtaatcccagcactttgggaggccgaggcgggcagatcatgaggtaggagatcaagaccatcctgactaacacagtgaaaccccgtctctactaaaagtacaaaaaacaaaattagccaggcgtggtggtgggcgcctgtagtcccagctactctggaggctgaggcaggagaatggcgtgaacccaggaggtggagcttgcagtgagccaagatcacaccactgcactccagcctgggtgacagagtgagactctgtctcaaaacaaaacaaaacaaaacagccaggcaaacctacactggagccctttcacagctgggaccagccaggtggctccagggaatttccttccatgtgcctcagctttcccttctatcaaatgggaaggagacctccccaggacacttgtaaaaatcatgtaaaaagatgggtgcagcccagggatggtatctcatgtctgtaatttcagcactttgggaggctgaggtgggaggagtgcttgaggccaggagttcaagaacagcctgggaaacacagtaagatcctgtctctacaaaaaattctaaaaatcagctgggcatgatggtatgtgcctatagtcccagctacttgggaggctgaggcaggaggattccttgagcccaggatcacagtgggctgtgatcaagccattgtattccacctgggagatacagtgagaccctgtctcaaaaaaaaaaaaaaaaaaaaaggatgcaaaagcaatttccaacagtaagaattattcatatgtgagtcttccatacatgtgtgcggatcaaaggatcactctcattatgtggcagtttggggcatttcagggcataggaggaaagggcagaatttaagcctgaaaactgcttccccaggctcctcagaggcatgtataagggcccttcacacactgtgaacaacataataaatacttcccgaggcctcattccatgaaatctaggtgcttgggtacccaaggagtcaggaggggtgattttatcatgaatattgaagcagaacagccctgctctgactcacagtctgttttccttcaaccgggatccccagaggcattgttaaaaaacgctcccgctgtgtcttgtgaataaaagatggctttagggcagcacagaatgagctgctgcctgggctaggaaacatcccctgtccaaaccttcatgctttatctggacacaagggcagaggccacactagcacttcaggacagagagtgacaggcaaacagtgcccggttctgtggtggatgacacaaaggctggtgcggaagaagggctgaaccccggggaggcctgacgcctgtcagtaatgagatcatgaaaaccagttctgagttgcttccatgtggccccacgaatatctttattccctgggtctgtgcctggggtgggcctcagatcccatagatcagagtgaaggggctgtcacatttacttgtcatttggtaattttcagtgaattaggggtatggagtttccatctgccatctggcctcactctggtaaccatggtaaccaccatctgcctgacttaatactattaagtcctgtgccaaaagagcactggacagggtgttgggaccagggagctggtcatcctttactggtcaccctggacaagggctctgaccttgctgtgtctcagtctctttctctgtataacagcagatttggtctgaatgtctttaaggtgcctttctcttaggaagagaatgccactctggggagaaattatctgagatcatcagcagcatttatagtctgaggacctggtcagcatttcttctgtctcctgcatgtggagttaaaagtgttacctgtctggagacaaagagaattgcctgtgaattaacggctgaggaaagcagttataaaaacgagtgataggaactagcaaaaggaaagagacaggactgtttaagtgccacagggcggaaaccaactgttccgagtgaaagggacctcaacaatgactccactggggctgatatggccagagaggggaagggacccgtccagggccactcagggagccagcggcagcacagatgcacccccagccagctctgtcctccatggggagcttcagctaggaacagccaatggtgactttcctgtgctcaactggccacacactggttttacatttcccaggactggaggcttcctgccccatctccaacaacccattgcgtctcctggacttgggtacatctacctgaactacttgagaggaaagactactagatacttcttaaggcttggaaaggtctcaccccaccccaggcttctttcttgaagctaagtcattacactgacttaggcactaaagtctggacttggtctctgggctcaggccagaattatttcccagaagcctgaactccaggccgaaacccaggctccttgggactcactggccaccttctcactcaccctaaactcagcactgcccactccaggcaaagtacacagcggcacttcaaaacctagtgggtggaatacactcatgcttaggaagccggtaaagcagtgctaacgttttggtttctttttgtttggttttcaaaaggtacataaagagggtgggcaactatagcactcagagattattttactgtgatgttaatgaagcttaagtttctaagtccctagcatttcataataagtttctaagtccctagcagttctattcctttacttaaggcaggactctccaaattatatatgttttagaagcacgaaacctgagtctgcccctaatagcaccacaatcttttcagaccttacgtctccaaaggtcttacttctcctggatggagctccctcagcatcccagctcagccccttcccacaccgggggccctggtgctctggtgctgtggcctggtgactactgattccccagtctggaactcatcctcctcctgcatcctcaacttcccttcctcccctatcctctacttcccttcctcccccaacctcaacttcccttcctccccattcaaacaatccacctagcgctggatacctgggaactcggatccccctccttaactcccagtctcctgctgggcaaacataccatgcctacaaataagtgactgcatcagcaggtacttaagtaccaaaaggggtagcaggctcaccaaaaattcgactagcacagtgagtggcgtctccaaggattctcgccccagtctctctgagcacgaggagagatatgaaatactgctccctaaggggaaactgagtgccaggcagcgccgtccaccactgggcagggggatccttcgctccacaccccagagggttggaatccctccttctctacccacccaatccccgaccctgactcaccgaactcgcaagggccgtcgcgcgccttgtgcaggtgaccggggtgcgcgcggggcgtgtgccgagcgcgcaggcgcagcgcgcagacgctggggtacgagcgaccgtcggagccgcagacggtgccgcgctgcgcgcacacgcagagcccggtgccctcgggcgctgccccagcggcctggctcgcgcataccaggccggggccacagcgcccgccggcgcggcccccgcagctcgcgccctcggctcccaggcagcgggcgcagcagccgcactcgtcgagcgccgagatcccgggcgccgggcagggcgcaggcgccgggcagccctctggccggcacggaccacacttggggcgccggccgcccacgtcgcggatcccaaggctcggggacagcggcggcagcagcggcagcagcagcagaagcagcagcggcaagagcagagacaagcgcggcatggcttgctccgggacagcggcggcgcctctgcttcgcgctccgctccgcgcccgccgagcagtcaccgctcccgccccgcggccgctgattggccgggcctgcaccgcggggcgcccgcagaccgctgctccagcccgggacccgcgcggtgcccgcggcccgggtctccgagctggagggtcgccccgagagcagctctccgacctccgattggactcttgagggaaccgagacccagtcggggcgacaacttgcccgaggtcgctatggcagagtcaggattggataaccgtacggtctccggatccaaggctggctccagatagtatgcccgtaaatcctcccagaaggatgcgctattttatttaattttattttgcattcagtagttttcaaagttttattttataaagagaatatatggtttaaaatgtagattttacatatacatctaaggatgaaaagagggttaccctaccaccttgtatccccatcctccaactcggcttccagaggccactcttgctatcgggtttttgtatatcttttcagaaattttctctatgcctataaaagtacatgtgcctaaaaaagccccttcctttaaaacacacacactctgtttctctctcacacacacagagtagcgtgccatacacattagtctgcacttggtttttgcacttacagtgtttcacagtttccccacctcttgtcatctgtgaaactgggtttcttatacaatcaatgggagcatagttcattggctctgtgagtgtgtttcttaatgctgcataaagtcatggtacatctccgtccacagtgactttgttgtgatgagatatggtgatatattttggagttcatacagagtggcctttccacagggtttagttgcagttatttaaccacttattttccatcctttggttaatacgaataatgctttgatgaagtcttggtgcacaagggtcagtgtacctgtggcttactggggaatgcatgttggaaagatgcagtttcttgtagtcagttattcatgccgccgttgcgccttctctgggccaggctctgtgcacaccatcctgcctgagttctggcagggcacccagacgagaaacctaagagagtcttggctgctgggatttgatgtgttgctgggtaaatgcactggatggagggagggactcgctgagcaggttttataggagacttttcctgcctttactggccacccctcatgtgtcttgtgctctattgttttttctttgctgaactcctggagatggagaaagcctcttgcagcctgggaagaccagctacaccgttcttgggtggggttcattttgcttttcaagcccagttccttcccagtttgcagtcttcttatccccagaaaggagcctcttctgaggccactttatgtggtggtcagaggagggccatctgcctggtccacgccaggccttaccttacaatcagccacacagagcaggggcggttaggcaccatgaaggggtgg

SEQ ID NO: 279 - DNA, 273737 bp, Homo sapiens
  source 1..273737: mol_type = genomic DNA
agtgttcaagccatatgcagtccaatcaacctggaaccaattagtctgattcacaaaaaaaaaaaaaaaaaaaaaaaaaaaaaatcccacttagggacaaactgtaatcaaacacctatttataagggtttattatgatcattattattattttactgagaggatcattctaaagcctgtcaggtgaacgtatgctttcagatcttcataaatgcaaatcgctccttctggggtgggtgagcaagctgagccgcagagctgccttgggaggcgatggggtgaggttccagagggcaggaggagggagcagttcactttcatggacatctctgcacaaagctcacccagaggcagcccagcaaccacccattgcccaccccactccctacactcctctcagagggctgctggagatggaactggctatagacccattgcccatgtaggtaaacgatgcaacagcctgactcagcaacctgccagagctagggaagctggagattctccatagaaggcctgggtaaagggacccacctgagttctgagcaggttttgcccctggtcgtgctggtttttctgggctttgccaatcttctgggtccctaccaatggtgaaattctatctcctgaacttcctcatctaaccacatccccagtccactccaagggctagagtacccctccccttcatcctcgcaggaggcctcaaagtccaccgccagggctgaggctcaatggtgtgtgtgtgtgtgtgtgtgtgtgtgtgtgtgtgctcgcgtgtgtgttggtgggagagtaatggtaacatacaagtcccaaacctgttcttctcggacctgggaagaaaagctgtcaggtctggcaaaaaggtggaaacttggtctctgccaggaggaaacaatcagttcctcacccttcctggctggatcctagcacatgggaaaaagacagaacacaccccatttccgtgggtccctgggggaaggagcagccgtaattggggaagtttcagaacatggaaaccccttaatcttgcccaatgagggcattcatcgttggcaaggtcagaactccagagccacaccctgcctgccctgctcccaggatggcatctttccctctcgggagggaggctgcctcctttcatcaggctgagtagcggggagggcgatggtaatcccggggataggaggggctaggtaaaggcggatccgatggagcatagcttccagggcggggtgttgggtcacctgggtaagggttaagaagctggaggcagcaagccagttttgagtgaggggggacctgagtgaggggagaggggaggttaggagggggtgagctctccttctccctgcaataaatcggcttagcggacgagagccgaacagcccagaaaggattaaagaaaagtctgtataatacgcggagagcgcggcgaggggagggcaaggagggcgggggggcggggagagggggagggacggagggagggcgagaggaggggggtgctcgcgccgccgggagaggcgagcgcgaggcagagagcgcgattcggctccaaactccggcgctgcagccgatcggactctgggccgcggtgggcaccgcgcgcagctagggagccgagaaccgcggcgagccccgaggacgcccagagcgcgagggtcgctgcgcctcgcagagccggagccgagtcgagccgggcgcccgggctgcctggccgcggcggcatgggggcgcccccgcggctctccgcgctgcccgccaccgcctcggccagtggccggaggcaggagcgcgtctgagcccatggcgaggggacccgccgccaccgcctccacccccgccgccccgccaccgccgccagctcccgggcaccatgcgaaccgccccgagcctccgccgctgcgtctgcctgctgctcgccgcgatcctggacctggcgcgcggtgagtgcgcgggcgcctggcgggagccgagcggtgaacgtgcgcggggacggggtgccgggggagggcgctggccggggtcgctccgagaggctcgggctacgagcaccggtcctgcccggggtctgtggagctggttggctcgatgagggagggaggacgcctcttggagagcgctcatggatttgtgccagggtgtgtgtgtgtgtgtaaattgtgtgtctttgttgtgtgtctgggtgagggtgtccgggaaggagctgtgtgggcagaaggtgcgggagtgtatttagagatgcaagtgtgtgtgtgcgtgtgtgtgtgatggtgtggggtctgcgtgtgagtgagcgagggtctggatgggtgttagagtgtctgtgtcagttacatggagaaggtgtgtgtgtgagagtgtgagcgaatgttggggggagggtgtgaacatgtgccaccttccctgtgagggtgtgaagtgtgtgagcttgtgtcactgtgggtgtgaggtgttagggggtgggtatgtgaggtttggcgtttcacgtgtgtcccgagtgtgcaggtctctaggggtgtacgacagcggattactatttctgtgtgcacaggagatgggactgtgacactggacaagagtctgcttatgtgggatgggtgggggtgcaggtgcctgggagtcgtgggcttcatggggctgggagtgtgtgtatgcgtgccatggagcgtgtggttatcgtgtgcagggaggtatggacgcttccggggctggggagttgtgagcagctcagtgtgtgtgtgtgtgtgtgtgtgtgtgtgtcccgccgtgtggacttgctcccgggttaggctaagacagctagaaggaggttgaagccgagcgggttctccggagccagtgagaggtggctccgcagccccagggtccgcggccggcctcccacccagtgccgccgcgtagtgggtcttaaatggagctgaaccctttcgcgcagtgagcagagagccaacgtgaggctaaaagccaggagggagggaggcgggaccagcgaagagccgcaggcaccgagactacaggctccgcgtccgggatcctcctcggagcctggtgccaacctcagcctggctggagtcagagcctggctccgcctcggaggggagcgggacgcgaggtgccaaaaagtcgtctttatgatcaataaggtctcgaccccgagccccactggatgatagaggtgggcatcacctctgtcctatgccatagccttgtcccagcaggaggtgcctacctaggctctgagagtgcctgccaggaaggggtgcccccttaaaaataaccccaactccttctaccccgaagtccttggggagtgctgggtctgctgatgggagaagctgcagaatttgagcccggaaggtggtcctgacagcgaggggggaggggttggtgtaacccagaaggaatgcaaaccctgtactttgttcccctacccttggaacaagagactttcctaagtggatcaaaatgtcccccctcaactttgggaggagggctctagagggaaaggttacatgggggaggtcctcgttccagcgccgccgagagggcactggggtttgttgaaaggcactggagccctcacctggacattgcagggggcgggggttggaggctggggacctaaggtaagcacccctttccctgggaatgcgcagaacagagagacgcggcagggtgaaggagaggactgatgagaagggcttgttgggaaaccctggctccgtcaggaccccaccctgcgagctctccctggaacccgggagcagggttcttctggctgcccggctgcagagagctgacccggcatcctgacgcctcaaatccctttgcccgcctctgcgggctgcgggaggcgggggttggcgtgcctgagggtgagcgcatctgggccggtgcagccagcgcggcctcggagctccgctgctcaggatgaaggaagagcgcagacgcggatcgcgaatgggaaactttccgcgtctggggcgcagagggagatccgaggcagccgggagccctctcttctccgcagaggagagcacacgagggtggggtccctccttcctccttccaagtctgtgcccagaatggggggcggggtgcgagaagagtccgtgagagacgcaagaggcgggctgtgccggaggagggcgcccttcctggaggtggccgagagaggtgcacctggcagcggctttgcagggccacctgcctccgagggcgcagagaggagcaacccgcgccggccttcacgaacgtactggcggtcactgctcggggaggggcacggccagaacgccctcgccggttctgcccctttgggtggcagagcaagggtgcccgacgctagagagtcgggtctggcaggaggaaggaggccgctgcccctcgcactggctgggccggaagtccttgccctggctccccacttcccagaatcagaccctccaaaggagaaacccacatttctcgggactcctgggcgtgtcctggggcgttttcaactcctccagcccccgtgaaccgtgcctgggcacttctgggaagtcctgcactggagcctgtgcagtggcgccgggctggggatggaggagtggtccttagccgctgttcagccctgggaaacgttccgctgagagcagggtgggggcagccccagttaggggtagcccacggccccagccgggggtctccgggattgcgcgggcggaggtgggcggccctgcgggttctcgggttctcgggttctctgtctccgcagccgcgtgtcagcaggtggatgggatggaggggctgtctccgctaggccgccgcaaccgcaacgccgagactgcgggggctgtgcgcgcgcgagcgggtgtgacgactttatatatttatcctcccttcacacgcccccttcccactgggcggggcctctggcgcggcagggtttcttctccagccccaactgggggagttaagggccctaatcccttgcaggctgcctcgcccatgcccctccagcgtggccccgcccctagccataaactccacccctcttccaccccataaccgctctgcaaatgggagtttttcattttcgtgttttaagtgcagagaatattcgagctggagcgacctcggagatcactcacttcggtggttttgaaacttgtgtgtttttctttttcttttaagtaggaaaacccttttagaggaaacattatcaccctcctaaaatcccaataccttgagcaagatgatagatcttaaagtaaagctgccctggtggatgctggggatgaggcccacatcgagcgctccttccacacaagtctttcacaacctcaagactgctcccttcctccgcagctagtattgtagctggggttttgtttttccaatagccccgattatatggatcagctgcgatgtgtcaagcaggatgctggctgctgcttcgcagtcctcattcatgctgcaagatagatttaagaccttcttttcacagattaggaaactgaggttctgaggtttaagacttgttaatgacagaagtacaggctccttccgctccctcctagttctgccccaggctcctctttccgctgaatcttcctttcctctctctggccgcaaagaatcccttgggcagggcatgtgagtagagaaggacccaggtcatctgagtgatgcctcagatctgcctgctactctgatatttcagaacgtcagtcacagacacacttgaacttcactacactctggcaagatgggcagaggacggagtaggggaaggaggtggaggagcttaggggacttgcttagttaggtgcctggtttatagtggtgtgtgacttcaaaggcagagaccgacaaaatagaggctgtttagttctattaactgggtttcctgggatctgtagaggtatttaacctaggcagttgacagcctggcttaccaccttgcccgcctccgctatagccccaggccaccaggaattcatttattcatgcatccaacaaatgcttattgtacactatgtgccagacacggtgctgagcattgggaaaacggccctgagcttggtagaggagtcccctgcctctatggtgtttaaggctcagtgggaaattgatgcttcatttagagggaggaaggggctattatctctctctggccctaactgagctaggtgtcacgccatgtgctttatctttcttgtcttacagaatccttacaagcaccctgagaagtaaaatgaagtccattttgtagatgaggaaactgaggctcagagaggctaggtgactttgccaaggctgcagagtcattgaatggcaagcaggaattcagatacagggccctctgactccctggcctgtgcttcctccctccatgctctgctgtctcctggtgatcatttcctgagccccagccacatggatgtgtccagtctcctgtctggatgcctgactccttcccaaacccacactgaaatagaatcatccagggtgttcatctgcacagatgggagagggagtgtccctgaaagctattgccatcaccaagagaatgaataggcatctgctgtgggcagggcacatgtgaaaagagcaaggcctatgagtgtgatcctcatcccagggcagcgagagactgggcatgtttccgaaaagatgaacgacaatctattttgtccatcctccctctccacctcctttcctcccccatccactcctgttcccttcctctcttttttctttttgccttcttttttctttttaaataaaaggaggttcaggatcttttgtaagtggaggaactgggagtttcaaaaccaggtctgaagcaatccagagacagctgctttttcatcactggaaagggagtacagcagcccttactacttgtaggaggctgcaaagctgttcatttcaaatgataaatgtcagtggtggtaaaacacatgagatcacttcctaggaggtgtccttctttaggatgaaattccagggaagattggggtggtgagatcctggaacccacctttatgctacagtgagctccaggagtggagggggctcatgttcactaagacccccggctaagattccatggatggagcaataaaggtagtgtgtatggggctggagatgcaggccctgttcagtcacctctgcagcccaaaagagcaggagagacaggtcgtgggcagggtgtggcttgggggtggggtttttctgagacccagactttagtcccctcccaggaaaggaatctggtgtttggtttttccaccagcctttgttacatcttctggccacatactaaatttgctttgggaaatcacaccaaccccgcaccccacccccaccccacccaacacataaattgcatgacatcttggtgggtgaaactactgggtaaggcatccccaagatgggccctggaatctgaatattgagcggagtgtcacaaagactgagagacactagaatgtcccccttgcccctgggacccccaggaaaccgtcctttgttggtttcctgagactgataatgatgggacctatctcccagtgtactgagagggtggaatcaggcattacaagcagagctcttagctcagtcccgtgggctctgatgcttgttactagtgttaaccatggtaacgatgagtacccgctgaagcagccccagtccttgcgttactcgactttttcgtagtgttctcattggttacattttttggcttgagagtctagtgtcaatttctgctgcttgcaaggaaaggatcccatgtgataacctctctaggtgtgatgaccagtgccagccttggagttgccagtcagtgcactcttggtaatgcacagaggatggttcatggccctctggctgggggtgaccaatcccaccgcctgccctctgtctttccctggagtcttgaggcccattgagtgcagtgtgagactcaagttgttccccgctagtaaaatgtacagatggaggccaatcttatagtgaacttccaatcccctgacccactagaccctgctccacccaggcagggaccccatctggttctgttcactgttgagtcctccacaaaacacatagcaggtgctcagtcaggttgtttgtttgggtgattaggctacctctggccttgcgacatgtgcaacctggttttgaaaaagactgagcatgtggctttctatttctatggaaaattgtgtgaaaaggcttatagcatgtggaattgaggctggacttgcaggtggacttcctggcagcaaagatgttctgatcctggaactacattctttctttctgcagtttctcagataaagtagcagaggccctgactagatatcttaactctctacctgctggcagtacttgaaaatgcacaaaacacttccacgcccattattccatttagacctcacatcacacagggagacagctagtcttgtacctgttgaacagatgagggaaaatgaggcccaggaagatgaaaggatggcagtaggcagtggctggactggaacccagattctgtggttgcgagctcagccttcctcccatcctcaacccattgctggacttcatttagccacaggggtctggcatgagacaggtcagtttcccatgtgcttacaggccagtaagctttgacctcaagtgtgcactgtgagctgtgtgctgctgtagccactttgctgctgtgacttcctctatcctccactgctgtccaggtgggtgttatatccccagtccacaggtgaggacactgacatgcccagggtcacacagcttgagacaagagctcactgtctcccctgtctccacagtcttgtcctgctcagagatttctggccttagcttctccatcctccacctcctcccccacttccgccctttcttggctcagagagcagacatctgccctcagctagcacagtccctggctccccataaggctttctccaagtttctgctcacccacatcctccctccacagccccccaccacacacacacagactcaggtgtgccctaagcatgttggcagcagtacttttggcaacactttgaaagcagccctccttggggctggagatcgttggggatagtctccctcctgaacagagctattgagggtgagcatctctgcaccctcggccctggcaccaggcctggctctgagcacatagatcctgaagatgtgtttgttgaatgaatgaatgatgtctcccctgagcctgaggtttggttcaaacaccagacccaggcttgtttcctggccctgctcagttgcctctggaagtcctttctggtgtgagaatgtgtccattgtccttctccattccatggaccacagtggcatcacagctggcatctggaggaagggccaacactgcaaggtgatgggaagaccaaggggacttcgtgtcccctctatgttctccttggagaggggactgtcctagatgggtgatggggatttgggaaggtaaagaaagaaggaaggagggaggaaaggaaggaaaaaggttgagaagggagggaggaagacaggaaggaaggaaggaaggaaggaagaaagaaagaaagaaagaaagaaagaaagaaagaaagaaagaaagaaagaaagaaagaaggagagggagggagggagggagggaggagcaagcattcaccgagcagctactatgtgccaaaccctgtgccagacatgttcacacataacatcatactcaactatcccagaaatgcctgtttgggagataatattctccccctttacagatgagtaaagaggcttggagagattgtgtgacttgcctgagtgaggggcagagccagattcacacccaggcattgatttgcacatctcttcccaaatctgagtttctcccattggtagcttgaaatagaccattactggagtattcacacaatggaaatcggcaaactatacattggggcctccctcacccgagaattggttgttacacacttgccagcacatccctgggtatgcccatccttcctaatccctccctgtctctgtggggcagccacctgcggttaatgtgctttggtttccatctgcaatgggctcctgttgtccaccacttcctaacaaagtatccttgggcaagacactcgctgtctgagtcatagtttccctgtcttttaaaaatggagggtgagtgagatacagcaataacacatgagagcttttggcatgtaactggcctctcccttcctcctgatggggccagcaggccatggagactctgaggagagtggggtcactgtttcttctccctctgctggagctgctttgggcgagaagtccacgatccagtcacttccattaattaagcagctgccccaggcctgattctggactgacagagacctctcggggagtttcaggttgtgggcaatcccacattcattgagaacaattaaaaatcacatgtaatcaaatggccaatacagggcttgaaccaagcttatgtctttggggattaaagggagtggcccaggaaggctctgaaggattgaaacaatcttgccaggtcaggagtggtttccaggcaggagaaacagcacatgcaaagggctggggaagagaggggaatgccatctgggcaagtgagggttggagctatgaggctcctggccttgcttaagtgcaggtcctggttgagaagctggggaggaggatggaggagttggcagagacctgcctgctaggaaagcggtctggatttgagcccatgggctgaggggaatggtttaaaagagtggagtggcattcccagagcagggctctaggaagattaatttggcttttctgggccacctgaagctggaagctcttttgaacctccactgggttataaatggttgctctgggttgcccaaagaaacgatggactccagaaagaaatgccatcgtttggagatggcccacttctcccagcacatcctgacccagtgaggagggaaagccaggcccttgcccaggccctaccaagattgcacagccttgaatgagactgccccagcctgagtgtgtaccttgggcttgacccaagagtgaagggaggaggagcgcggtcctggggagaagcttctagatctccaatgggcatgggctttgtagtctaaccagctttcagattccacctccaccacttgtccaatttgtggactcaagtaacctcttcattattttacccttggtttcttcaaccgcacttgtcactcttcatggtggcctcgtctggtgggggctgctgggaagcgtgaatggataataccaggaggccatatgcacagtggctagcatacagcaggtgtttgaaaagtggttgctcccttgatgatgtttggctccccaccatgtggtaggagcaccctccaggtttgaagggaaagaagtgtttataacccttgattcccaggaggagaggatgcatggcaggtttccccatgtggatcactggaagaacctttgggtttggaattacagagcatctgagccagaagggagctgggaaattatctgcactgtctcctctctccccattttacagacaagaaaactgagcccagagagaggaatgagtccttctttgttgcatgcactgagcatgatgtggggggcaggtcttctccttcaatgtcagggacctgtcccagggcttggccaggtggacccaccacctgaagagcctggcatggggaagcctctgggtcccctgaaattgggtggggaccttggcagcacttcagtagggagcaacccccagcctcctacatcacaggacagcttgggagtcgccacggagagaagcagctgagcctttggggtttttttttgttcctttgccaagctgttccctttgcccttttgtttctctttctacagaggcgctcagcgctcctctgatgggcttgtttgtcaccagtcgttggtgcttcctttatctccccagcaccatctcttcctccttttttccctaacgccgccccaaaggaaggcgttcatcacaggctgccctggcatcattctgggctgggctgggctgggggaggggcagcacaagcgtccgatacactggcagaggctggggcagctggagggtgggtagctgtggcatcttgagctggtgctcaccgcccgagtgctctggttttgtcgagtgggtattcagaccatacaacagccaagagctgaaggaaggccaggtgtctggttctacagaagcaggtgatgagttgctaattgttacccagcacctaatgtcccaggcaggggcggaaggagtgaggtggggggcggcaaaggcagtcaccccacaaagacttctttgtttccgtctgcagcagagaagtgggtctgatctcagcttggaagggaagaggcatcagaaggccaattcctagggcctgttgcctggctggggagcttttgggaaggtggggggaagaaggacaagttaccccatggagagcatgggggttacctcatggggaagagttagtcattcccaggccagtctggcttgcagaaagcaacttcttgtttcaggaagcaatatagtctcttcctccctccctcccttctttctttccttccctccctccctccctcccttcctttcttccttctttccttctttccttgtctgattgaggaactgaattttgttgaaatcagctaaatagaagctaagacaccttacttagttttcatttaaacatcagtagtcacacatggctatgtattgattggaacagtgcagctctagactgtaagccctaggagggcaagaacttacctattcccttctttccttcctcccttcctcccttcttcccttccctccttccttccttctctggctcttgttcatttatgcagcagatatttattggatgtttcctgggggtcaggcactgtgttgggttctagaaatccagaggagggcaaataggcaagttcttgccccactggggcttacagtctagggctacgctgtttcaataagtggccatgtgtgactactgacatttaaattaaaactaagcaagttttctcagcttccatttagctgaattctacacattcagttcctcaatcacctgagtcacattttaagtgctcaacagtgattggcggctagtgatgacggtattggacagtgcacttccaaaagctctactggacagcactggtctaggacaatgttcctctttgggtgtggcatgcccactgacaggaagaaagtaacaaggaatcatagcaagggggtggctttctcttttcctttctcagattgtccttctggctgtgccaaggagaaggtctcaggctgatgccctcaagctttaatgcccctctatcacatgctgatttctttccaacataaagataataggtctggggcaacaagcctccagcgagccagagggggcaaggcttttaataacggtgtttttttttttttcattgtaattatttttcagtcactctctgtttaaggcaactggtaccaatttgccatttggggcagtgatttaaattctccctcttttaaaaaaatggctttatttaagtaaaaaatgagtcaagttaaaaatgttaagtacatagtggagcaggtggcatgcagatatggccaatctgtgaaggtggtggatgtgaatgtctgcagttagaaacctcggttcagatggaaccacatgggcttctggaggcaccaccatttctatgttctgtgatccggggaacaagttacttcagtccttatcaatcaggttctggcaggaaacggcaggctcagcctggagcgtctgaggaggacttgttcaagggactatttgcataggatttctggaaaaccgcaggggatggtgcagccccttggagctagaagagtggggcactttctacctatagcttggaggagtagatgtaaccagaaagcaggctgggctgtgccaagaggactgccagacagccaggcggccctgtgtagaggactgcagccaactcttgggggcctggcaggaagctggagggagaaataccccaactttaccctcttcctgcctttgggtcccttgatggtgccacccattgatcaaaccctattgaaagcccatacagatcagcctccaaagtgcagagctggtagaaagggaagagaacgagctggggtccaagtagcagagatccagcacaattctgctaagcctcagtttctccatttatgaaatgctctacgatgctcattgtacctgacagggttgtggcgatggtgcaatgagacaacatatgtatagctaatgattggtagctatttatatttataacaacagcagcaaaacggtgcctactctgcagtcccaggctccatggtagatttttcctgagctaggaagtagcatatgagaatggggttttagggtacaaggtggaactggcttttcggcagcatgtgaatttgaaggggcagacaacattggaggcaaattgcagcttgcaaagcggaagcactagcgctctccacaggctggtattgacctttgcagtgtgtccttcctactctggtctcttcgacatctccacatctcccctgtgccctagtccatctcactgattgattacttcaccccagggcttacctattcgtcattccccagtctattttccaccctatttcacacggagacgttctttctccttagatccatttaggtcatctttccaccatccccactggctcctatcatgtgcagcctggtccacatcagttatgaagaggctcaaagctgtctccttccaaatggaaggcaggtactctccaagcctcagctactcctgccagaggctactttcacccttgcagatgggggaagggaagatactcttgagtaacttagcactttggaccactggatctttatccttcatctgaaagctggaagtgccattgccacttttagagggacctaaaggagtagctggagctcagggagtagctggcttctacgtggagataaatattcctcaggaaaacttccaccggcagtcctcttagctcccagctactaagttggctgaggtggcttttctcacgatcctctatttccctttgtccagccccttttctcatctacctgactgttgaaattgactttgatgaggactaattttgtccgttgaaattcatgagacgcttacccatttggtgctttgctgaaattgccgtgacaaataccagtggcaatttcttccctggctcattctctaaagtactctgggcaagacagagtgcacctgccctcgccgacatgccatctgtcggatctgccatcctccaccagccctgctgttggccctgccccgatgcaggtccatctcagccattcctacgtgctcagtggtgtgtgaccctttaggaggagatgggttgcctaagggggacaaatatgccttagggggaaaaatttcacccacacccccattggctctcaatgtccaagttggctgaggtgatattcctttacccagcccctgttccatgtacccgactgtccaaattgcctttgatgaggactcattttccagttgaataaggggacacgttctgtaggccagtcctccatcacaggcaggtgcaccacttctgtctccttgagccaggtcctgggtcaccaggatggctttggtcacccatgagtctcatttgcctgggcggtaggggtactgccttatggcttgtgagctccgaatccctccctggtctgagcctggacacactgcagagattgccaaagaaacctcagtcaccctcttcacgacttttgtcatgtctatgtctcatctgtgcttttttcttttcttttttctttctttctttcttttttttttttttttttttttttgagatagagtctcattctgttgcccaggctggaatgcagtggtgcaatctcggctcactgcaacctccgcccccagggttctcatgcctcagcctcacgagtagctgggattacaggtgcatgccaccatacccggctaatttttgtatttttcatagagacagggttttgccatgttggccaggctggtttcaaactcctgacctcaagtgatcttcctgcctcggcctcccaaagtgctgggattataggcgtgagccaccacgccaagccaccccaactgtactattttttacaccatcattttcttaaaatcaaatttcaataatggacttcttcttttttggcttgtctggttccagggaataatgtatgggtttgttgtattgactgtcgattttttttctttttttttttttttgagatggagtctcgctctgtcacccaggctggagtgcagtggcacggtctcggctcactacaacctctgcctcctgggtttaagcaattctcctgcttcagcctcccgagtagctggcactacaggtgcatgccaccacgccccagctaattttttttctgtatttttagtagaaatggggtttcaccatgttgcctaggctggttttgaactcctgagctcaggcaatctgcccgccttggcctcccaaagtgctaggattacaggcatgagccaccgcacccagccagattttttattaattcatattaagataaatatgtgagtatttgaaatttttgagaagcttctctcataccatcttagcatcagcctgtcagctgctttggaaaataccagtttggtaggaagggcaccagcctagcagttttggaccctaggatctgattttaacttctccattaatttgctgtgtgactatcccactctcccgggtccgtaaaatgaaagggtgagtccggatgatcccattctaagattattcgatgggcaataggatttagaaggaacaccccacctatgctcaaaatattttttaaagactaatttgatgccttcccagcttcctgcctctaggatgaagcatctgcctctagagaaccctggcaaagaatagctgtgccagtgacaagggatgctccatttcctgggagcataggacagagccttattccagctccagtcagcagccctgcaccaagcatctgctctggctcgggccttctactagggctggggctccagagacaaataagacccagtgcctgtcctcaaggaattcatagtctcttggggctgataggcaggcaaacaaataaatcatggcataatattggaaattctaaggttgacataggtaccaagtcctagggagagtgcagaaaagggaatgcttaatctgcttgaggtgtggaggagagtcacagatcactagaaggggtgatgcatgactgggtcttgaaggatgcataggagtttgccaagtaaagaagggagtggagggatctgagcaggatacaacagcaaggataaaggcctataggctggaaagggcctggggcacgtgggagagtcgggaggcaggggtgaaggatgtgtattgcaggtaagaagtgaggctggaggggacacaggggacagatgaagtgcatttgctggaggtaagccagtcctgcaattagacaaattccctagctgtaggccccctggcccactggcattcacggaggcctggactctgctggccccaccctgggaagcatgaagcccccctttcccactgaaaatgccactggtgctgtttgccccatgcagacaggaagagcactccagagggacagggcttcagagcaagaagcagaggttggtcttttgacaaggtgctgcctccttctaacccaggccctgcagctgcgacagccacactagttataaagcagcccctctcggctatatggatccagagaaacattgaagccaaaataggggtgtggccaggtccaggctctcttcttcctggacctcctcgtcctcacctgcaaagtgataacagtagcaaatgcttattgaacacttgctgtaccccaagcactgtgacaagctcctgcttgtattacctcactcctaaaatctttgcaaccgctcaggaggtgcatgccactagtatcctcattttacaggagaaagaactagtgcagagaggttaagccaccggctaaggggttgcgcagcttgtaagtggccatgctgagttttgaacccatttggcctgcttcctgtactctctgccttcttgcttctctgcagaaatcccttccaacttgaccttctgtgattctgaggctgcttggacttcccatcctgaccttatgtggctcttcgtgtctcaggggctccagctacagctggaggtggccccggaccccgtggctgggctgctgtggaaggtcacagggctgcccttccctgcctcggcagtcactggatggcagcttggctctgctgtgttgtctctggcctcgttattattattacttctttccagcatgctgctaaaagcttcccgcagacaacacacaatccagctctttaaaatttaaagggctttacttaaacaatgttatttccctcggaaaggagacagaagaggcatatgcgatagttatatttagtgcggcgtgtgggtctgagcagatgagtgtggtgtttggtgggtgtgcaagtgaccagggagatgtcatccatggtgatggggccagggcaaaggcactcgaggggaagatgtgccgccagcatcccctccctctccttccccagaaagtgtggcctcagagagaaactactgtgcaacgttctgggaagaagaggaggatggttgccatctgagggactcactggagagacataaaactggacaggaggccctgtccccctgccacacaggctctcagcactgaagacacagcactcccagctgccccagggcctttgcacatgtggttcgaactctgcgggaacccaccttcttctttggactatatcttcttcatgattcaggtctcatctgggacatcacttcattcattcaacatgtattttctgtgtacctactatgttcacaacaccatggggcacaaagaccagttgtgactcctcttcatgtcccctgagtctggcacaggtcctggtgcagggcaggtatcagtacatgtttaggaaattaccaaggcctgtgtggatgctctggggtctggaggacagatacggctacctcgttggaaatttacagcagagacatcaagaactctgaatgaactgattaaagctggcagagccatacctgctcagggaaggaagggagagttcacttcctttctcctttagtgcatctattgattcattcatttattcattcaactcatgtttattggacccctgctatgttccagatagtgtgctgggcactggcgatacagtggtgaataggccaaagataaaaccttccctctgggagcttaccttctagagtgtgtgaccagccagctaacacatacgtgaacagataacgtaaggaagtagtaactgctatgaagaagactaagacccagaagagtaatggtgaagtgtgggggttcaggattgggcaggggccctattgatggaatatctatgttccagaccctgcgcaggccttggggctgccaagaagtcaagaaaggtaatcaacaactacaggaaatgttcaggaaaaaggaggaagccaggataacccagttagtagtgaccaggggaggcttgctatcagggaggacttcggtgaggttctgagagctgagtggggccttgaaggatgggaggccataggcaggacttagcagccggcctttggttttcaaactgtgctcctttgaaccccaacttcccatagaggtgccccaggggaccactttgggaggcgagaatgtggctcaagatgatggttgagggggttctcgtgccccaatcaagctgagagctcgctcgctttggctctttcacagatggggcttcagttccagcttcactttgaatgaaaataaaatagccaagaaaaggaatttgaaaatgagtgggctggatgatggggaggaagtgcaggccatctgggctgggggaggttctggagattttctgcttggttccaccctcctttcctccacatgtggggaaactgaggattagagaggcctttgggttgtcccaggtcatcagcaggagggggccagatctgggataaatgcctctgacttctgcctctttccaagctgggagggaggcctgtgagaaagcccaccttgactctgaccctggacccgaggctcacagctgctgttggggatcctgactgcggcagtgcccccctacttgtggctcctccaccccaagcccagctgcaggacaccccttctgaacctctcctctgccagcccaactggcctgccccaccctcatgggagccctgaattaaacgaaatattttatgatcccatgcttcgttatgttttattaaaagagctggtgctggcttccgctggcacagctgctgggcccagtcctgaggcttcctccccccacaccccctccagagccgacagctgccacccatcctccacccctaccaccaggaacagccagggtgtcaggtgctgatgagatgaagggaaatcctgcaggtggggacagattggggaatttggaatgataatcctgcctggtgttcacacatcccattagatgcccctcaccctgcatttctgaccctccccacgtaccccatgcaaatacaagcccaggctgttgtcccttcccaggctgctcatgttccatctaccagtgaccacatggaactccttgctctcagctaagtcactggctagatgggtcatcttgaacagagcacatgaccacactgagcctcagtttcttatctgcaaaatgggagttggccaggtcaggcaagggctttggcctcatgggctgacattctggtggatgagagaggaatgaacatacagatacataacctacctctggctgtggagctatgtgaggggagtacagcagggctgtgggatagtgagggactcgggagcagagcagcttctctagattgggtggtcaaggaaggcttcttggaggaggtgccctatgacctgtcagtttcaatatggaagtcatgaggaaagagtcctggcatctagatatttctggtggagaagcagtcctcctccggacagtgctgtgtggtatcagggccacgtggagaacttagggtggggcctacttaggtctgaatgagagctgagccacctgctagatgggtcatcttggacagggcacgtgaccgctttaagtctcagtttttcatctgcaaaatgggggttggctgggcactgtggctcttgcccataatcccagcactttgggaggccaaggtgggcagattgcttgaacccaggagttcaagaccagcctgggaaacatggtgaaacctcatctctaccaaacaaataaagaataaaattagccgggcatggtggcacactcctgtagtcccagctactcgggaggctgaagtgggaggatcacttgaacccgggaagtcgaggttatagtgagccataattatgccactgcactccagcctgggtgacgtagcaagacactgtcttctaaaaacaaatgggggtgaagctgaacatctttgcccaaagcatctgacatccataactatttaattcacggtgggctccctcactaaaggagagagggcatttaatcaggtcttcattcaagggaagagattagtgatactcttggatattattattattgttgttagctaatactaatggataacttactactcgtttatccaatatttattggtctcctactgtgtgcctgggaggtggttctgaacaggaggcaagagctttggctgcatgggctgacattctggtggatgagacaagaataaacatatggataaataacctacttctggctgtgaacctctgtgaggggagtaaagcagggctgtgggattgtgagggactcaggagcagagcagcttctctagattgggtggtcaaggaaggcttctgggaggaggtgccttatgagatgagtagggaagaaaatagcaggaaaagtctggctcagccctggtgttggcgtctcctggccagggcgtatgtttgtagctgattccttccctggatggggccttctctggactctgaccccattgctgggaatctgtcactggtaattccctcccaccagtgatgcaagctcagctggcccatgacagtgtcccctttggccctggggagacccgaggaaagagcattccaggccccagggaagcaattctagacctgttcttatttaattcttgcagaactccacgtggtgggccctactgtattctccatttgcagatgaggagactgagactcagagatgaaactcccctagtgggtttgtggaggagctgggatttgactccatcactactgagttagccactgtctcttgctcattcgctgtgtgtgtgtgtgtgtgtgtgtgtatgtctctgtgtcacatgggaggatgatggagggaaaaagcccacccctcacctccttttatttcaccttgaaccccaggatacctctggacagggttggagcctccagcgcttgggtgagtgggctgagtggcctggagcccacagagtattgatggctctcaaagctggcaggcattgggaggcagaaaggtattaattagcagttattccccagcagtggggagatggatagagattaaggtggcggtccgtgcatccgttttgtagcagctgaggagcaacagtaagtcagtgctatgaatcgatactgtaagagggagatacgttttaatcttattagcagtatagcgttatggggagagaggcaggagaattcctcactcaaggtgcctgggtcaggaaaaggggagagagagtaaccggggcttggaccatctgggagggcaccaggatggcaaattttactcaggttgggaaaaggcaacgggcagggaaatgagaggtgggagaggaggtgagaggcaggaaaggagtgctgggtcagcagagggggacccttccagtcttcccaagggtgtctgtcatggatgcagttctctcatgtgccccctctagctcctccccatgaataagggctctgagttggacattggttcaaccacgccacctcgatgagcctctgactctggcactggcccttctgaggttattggcctggccatgccacccacgggcaagactcagaggctgagaaggggtcagtgggtggaggcatacaggccagcactgtggggctggtgaggagggagccatcatggaaagcagcctcagcaggtgcagtctcgtatcgacccagcaacccctcatggtaggcatcttgtccccatgcacagaggatatgttgtgatttgaatgtctgtctcctccaaaactcatgttgaaatttaattgccattgtagcagtattaaaaggtgggactgttaagaggtgattaggtcacgcgggctccacactcatgggtcggattggtgctgttatcaatgggtgagtctggcccctcttgcccttccgcgcgccttccaacatgggatgacacagcaagaggggcctcgtcagatgccagcctctccatctttccagcctccagaaccatgggccaatacctttctgttcattataaattacccatgttgtgatattttgttaaagcagcacaaaacaggctaagacagaggggcagaggtgcaggaggtaaacagacttgctgagtatgggcggcaccaggacttggtcctacctctgagtgacaaaagcccagtgtccttctgctctaagcactggacaccaccccccaaccccatcccacaaaagccgtgggaaaccctgtgaccctgtgaggtctggcctttgagtgtgacaaggggcttagaagtgagacaccctcttcttctctttctcccttgctttagttcaactcttcacaccaggatgagaagttcctgtgggaagaagactgggaggaagagaaaagacagaaacggagcagtcaggatgaaccatgagcacctaccattctgttccacccagggcaaggggctggctctctctgggcctcgttttccttaccagacctctgagggctcttctagctagaacattctctgattctgtgtctctctcttcttaaaccatcagttgtccactgtatcatgtaatcctctcagtagcccctgtgacataaacatcattagccccattttcaggataggtaaactgaggaactcagaaagggttagtaactcacccaaggttacacagctagtgagtgtcagagcccggattcaaatccagatcagctggctctcaggagctcagaactcttcattacacagcacacctccttgtctgaatatcaggacatttgtggagaaaaaaaatgttacctgagaaaaaagatgactccagaccgcttgtggagagcagcagccctcctacaggtgtgcaatggaccctcctgccactcagccacctcagaatctgtccatgtccggctgtccctgttggcccccctgctctgatggctgagccagccctggagaatacagctctcacagcctgtatgggggacctgagtgcccctcagctctgacagcctcgggccggctgatggagatgtctttgaggtccgcctaggcggctgaggacagagccaggcccgagggagctgcatgtcttgacctcctcatttcctctatccagggaggagagaatggagctccccgtggattgagaaaaacccctccagaaagatggccactgctagaggaaaggggtccagctgaggcttcctgtccctgcttggggaggggcatacctgaggcagatttttgtttttttcttcacgtgtctcagaagcagaaaccacactggtagctcagacataaactcccaaccctagcttctgaacccagaggttgatgaagacatcgcttttccatcccagactgattttctcatctatacctccagctaggagcacactgtcatataaagtgaacggatgaaggatgtgggaggcagtttcaaatcctggcccaccgcctacaagctgtgtgatgctgggcaagttacttcacatctctgatgttatgacaattaattgctacatgtaattgttaagaatcaaatgacatgattttatctctttgttcacttacagaaaggtgtgttataaaatttaattatattagccatggtaacacttgttgctataacaaacccccaaatttcactggcacaagctcgatagaagtttatttttagctcacatcacagttcactgaaggtatctctgtaggcgggtggttttcctccatgtgctgactcagggatccaggcctccttctgtcttgtggctctgccatcttctggggcacatagtcctttccaggcagtggaagaggaaaggtagaggactgtcttctacttcttataagcctggaagtggcacatgccttctccttatggttcatatacaaaggtcactggccacacttgcatacaggagagactgggaaatgtatcaaggtggtaggggtgggggttgaggggtggtttgccttccagagacaactctgtataatgctgaggaggagagatatgaatttttggtagccagctgctatctctactttaataaatacctcatttacttgcctgctttaccccttctgtgaaatccatgaagacagtgtttctgtttgtcttattgatcctggcttattaatttctgtaaccctagcacctaacactgtgctggacacagaatatgtttatccaatatctggatgaatggatggatggatggatggatggatggatggatggaatgatagtaaaccaaaccacactgacctatgacctatgacctatgacctatgacaaacacactgacctatgacaaggtcatatctatgacccatagatttgacccatagatttcccctggatttatggtcagccctgtgggcatagggccctgcctgactcattgactgtcagattcccatcactgagcatggtgcatggcaaaaggcagcttttcagtgtttgttgaatggaagccttagagaagacctttggaaaggtcagtattagaatctgggctcagcctcagcagccccagcctgtaggcagagggatggccaagatggctgagatatgagctaattcccacactgcaaaatgaccgcagagatttaccccatgattgcgttctgggtcctggccacctcttgggctgtcaggcaaggagggagggaagccccttttcttctccctggcaaagactgagagttgaaacctcacttccaggggccccacccaatccatcctgtgctcatgggtcccttggtgggcaagggggtgggggaccgctgctgggtttaacagggtctgcaaacttccccatgatgcccttaaaaggtgtcctgccatcccttaagcatctggcaagcctcctagcatctccctgttttcttgtactgggcggggtctggcctgtggggcagaaacagaggctctgagcaggtggagggagtgggggagggaggggacggagacagggttgagtgtcttcctttcttcttgccagaccagtgagaatttggctttaaatttttaacctaaatagagttatattcattctctctccctctagatgcaaagcacttttttggagcaattaaggaaaagcataaatcagtccggttttaaaagctcaggctgactttgtggattgctaaaattagcgtctccataaaggaagagggagggggaagggaaagctggatttggcttcaagatacccatgcactgaggctgggggtgaagccaggcctctggccccagccccaaccttcctgaggcccccagagcatgtgagccagggctccggttccatctcgcctctgctgagcagcggagcctttctggtctaacccccatgtcacggcttccctgattccaatttggcggaagacagtgggtttgcagagtggctgggtctgcactcggcttcactacacagccgctgtgtggccctggacaagtcgcttcacctctctgggcgcccccgcttctccatctgacaaatgcggctgtaatttacccttcatggcattgtccagtgggatcatctgagcaaatgtgctttgtaaatggacaggtgctccatgctgccgctttcaggtaatctacagcctcctccacctgactgcactgccagcccccttgcaccaccatctccttcagatcttcccctaccaacagtctgccccatggcacggagctcagaatacaaagtaaccactttcctcccgtgacccctgcctcggtttataatgacacgtcctcaggccaaatccttcactattggacaactgccgatccccgttatggggctggaagcctccggtggggggctttgttggcttggtcactgcaggcacgttgtaggggctcgtgaatatttacttgtggatgaataaattcatgatgaccacacgggtcagtgacttcactcctcagctttctaagcataaaatgagaataataagaatatttactttgcaggggagaataaaatgagctaaatcccttatttaagagatctttatcaagttttgataatgtgccaggctttggagacagcagtgagcagcatggggaggttctataccttcaggtagctacaaactagaggaaggtaatgtgtgttttagcacctaggagagtggcttaccagttactcttagtagaaccatgagtgagtgagtgagtgaataaatgaatgaataaaaggaaaaccatcttctgtggccccccttaaccctcctctgtggccttcccattacctggggagctggcatttttgctgtttagaggtctgattctgctgtcaccctctctgaattttccccttctgtaaggggggcagagaggctgtcatctcaaaccccatttgagctgccagagatgttctgattccttgtggacatggcctcagaagcttctgaggcagaaatcctataaccagccctttcctcctctggttcttctctgtgaccagctttgatgccagctcatctccctgggggagggttaattactcgcaggcactatccgctcatctcccaggcctcttatctgagacataagcatttaggcaaacacattaggccagagcagggcagagcctttggacaaacatctctgggcttttcctgggctgtggatgcacatgggcattggcctggcctcctcagtgcccacccccctcttccccaccacagcacccaccacaaagacctgtccagcccacaccttcagggtggacctcacaggtactgaaaaaccccagcacccaagcccaggtcctctgccccagggtccatgggcagtgagagtccactgtggctggctcctccccgactcaacctgctcagaccggggcctcagtcagttacagtgagacagagaaatcctacatagggttccacagccatgcctgggagattagaggattctctgtgatttagattgagcaacagatttttctggaggaaaagggctgctactgagcatatgctcactccaggccctgggctttgagcttccacgcacatcagcccacgccatcctcctgtcagcttagtgagctggggtattgagctcctgttacagatgaggaccccaaaccccaaacgtgaaatggcttccttcaggaagctggggagagaaaatcacattgactgggtgtttcctggggcaggctctgcccaagatgcctcactgacctgttgtattagacagttcttacattgctataaagaaacacctgagactgggtaatttatttatttatgtacttgttttatttatttatttatttttattattatactttaagttttagggtacatgtgcacaacatgcaggttagttacatatgtatacaggggccatgctggtgcgctgcacccactaacttgtcatttagcattaggtatatctcctaatgctatccctcccccctcccccaaccccacaacagtccccagtgtgtgatgttccccttcctgtgtccatgtgttctcattgttcaattcccacctatgagtgagaacatgcggtgtttggttttttgtccttgcgatagtttgctgagaatgatggtttccagcttcatccatgtccctacaaaggatgtgaactcatcattttttatggctgcatagtattccatggtgtatatgtgccacattttcttaatccagtctatcattgttggacatttgggttggttccaagtctttgctattgtgaatagtgccgcaataaatatacgtgtgcatatgtctttatagcagcatgatttataatcctttgggtatatacccagtaatgggatggctgggtcaaatggcatttctagttctagatccctgaggaatcaccacaccgacttccacaatggttgaacttgtttacagtcccaccagcagtgtaaaagtgttcctatttctccacatcctctccagcacctgttgtttcctgactttttaatgatggccattctgactggtgtgagatggtatctcattgtggttttgatttgcatttctctgatggccagtgatgatgagcattttttcatgtgttttttggctgcataaatgtcttcttttgaggaatgtctgttcatatccttcacccactttttgatggggttgtttttttcttgtaaatttgtttgagctcattgtagattctggacattagccctttgtcagatgagtaggttgcaaaaattttctcccattctgtagattgcctgttcactctgatggtggtttcttttgctgtgcagaagctctttagtttaattagatcccatttgtcaattttggcttttgttgccattgcttttggtgttttagacatgaagtccttgcccatgcctatgtcctgaatggtattgcctaggttttcttctagggtttttatggttttaggtctgacatgtaagtctttaatccatcttgaattaattgttgtataaagtgtaaggaagggatccagtttcagctttcaacatatggctagccagttttcccagcaccatttattaaatagggaatcctttccccatttcttctttttgtcaggtttgtcaaagatcagatagttgtagatatgcagcattatttctgagggctctgttctgttccattggtctatatctcttttggtaccagtaccatgctgttttggtaactgtagccttgtagtatagtttgaagtcaggtagtgtgatgcctccagctttgttcttttggcttaggattgacttggcgatgcgggctcttttttggttccatatgaactttaaagtagtattttccaattctgtgaagaaagtcattggtagcttgatggggatggcattgaatctataaattacctcgggcagtatggccattttcacgatattgatttttcctacccatgagcatggaatgttcttccatttgtttgtatcctctttaatttcactgagcagtggtttgtagttctccttgaagaggtccttcacatcccttgtaagttggattcctaggtattttattctctttgaagcaattgagactgggtaatttataagaaaagaggtttaattggctcgtggttctgcgggctgtacaggaagcatagcactggcatctgtttctagggaggcctctagaagcttccaatcatggtggaaagtgaagggggagcaggtgcattgcatggccagagcaggagcaagagagcaaggtggggaggtggtgcacacttttcaatgaccagatcacacaagaactcactcactatgcaaaaatagtaccaacttgggatggtgttaaatcattcatgagaaatctgtcccatgatccaatcaccttccaccagaccccacctccaacactggggattgcatttcaataggagatttaggtggggacacacatccacctgatccccctgatccccctatatcacctgtcttccttaatgctcaccccaccctaagagattggagccactgttattcttgtttcacagatggggaaactgaggctctgagacatgcagtcacttgcccaagatcccgtggctggtgagaggcagcaccatatttcatagctgggcgtgggaaactccaaagtccctcctttgtacagtgcaggacaaagcccactgaggaaagccactttggggggatggagacatagagaaagttcataactctaatatatttgcatggatttctaccacatatgaaggattttcatgtgtttatcatctggtgatcctaccacaaccctttgtggtaagcaagataggtatttatttaacaaatatttatgtagtgcttactgtgcgctgagaagtcttctaagcgcttataaatattaatgtgtgtaatctgcattaaaaactccatgagttagattctattattttctccattttataaatggagaaaactgaggcacagagaggttatgtagctgactcaaggccacacagcaagggagtagcagagctgggattctgtttccagcagatctgacctggcgatagaagccagggccatcttctttctctccctgtctttggcccaccgtgtccccagcaacaggacacatgatccatgctggggacacatgcagctgccccagggttgggctgaagataatgggttcgtaagtgacaggtgggctgagctgggattaacagagccagagacagtttgctctggagccccaagcatgggctacagaaccagtgagctttaagatccttatctcatcgaggaaatataataatccctcgcaggacatgtggcctcactttcttcatttccacagctttgtccagctgtttatctcaatccatccttacgatggcctgagaagtaagcagggaccagtggggtgttgcttgatcacttgcttctttggggtctagcacgggggaccgtattcctactactgctactgttattgcttgcttttggggttcccttcaaagcagagccagagagaaggatttggatgcaggggtttattttgggaatgaccccaggaggtagcagcaggagggatgtgggctgggaaaagaaaagcaactgatgcggttttcacttttgctctctcagtgagggaaccgctgacaggcagtgtgggacatactctgaatcacctggcaaggggcgaggaagctggggtactgatcctctaacccccacctctcagtgacctgccccacacatgggccaagtgctctcacagcagacttcttttaggtaaagaagtgcaagatgccagcttggcatctgctccctcgccaccaccattaactgagcacttactatgagccaggatgcccgctaaggcccttccctgaattagctaaatgtcttgtcaatggacattattgtcctctttttacagatgaggaaactgaggcccagagagagccacaaagagagtctgggagagttgggattcagacctgtcattttgtcttcaagcacttagtaagcacctgctgagtgccagccagtgtgcttggtcgtggctttgccgttaaaacccacatccttacccactgaattcaatgctgctggtgcaggagcgctcttccctcttgggtgcagagtccatattttctggattctctaggatggtcccaatggcaacactttttattcttttcaataaagataatttgtggtatatataaccaaatgcactctaatgtttaaatcttggtaacactttttgcatgaataaattcactcttcccttcccactgggagtgctgtgtctaatgagaaattctcatttgggctgggaaaatgcggtcgctgaaccagagggatgggagccggggcatctgactcaaagctcagggttccgggagctgtctacgtcacacgatgatggggccagttgggttcctgagcacctccccctgctggaagatcgtgcaggctccctgggcgatccatctcacccaccctcttcccagtgtcttcggcctcccagagcttcttgctcccattccagagcccagggccttcccctctgtcttcatttttcaccaccctctgcagtgctgtcgtcaggtcaggaatggaccactgtcaggcagtgtggctcagtggttatggtcaaaggctctgggacaggtctctgggtttgaaggccagccccacaacgtgttgggtgtgtgacctaggcctcattatctggatgccctaggcttcaatttcctcatctgtgagatggggttaatattgtagcagatgctgtcagtgcctggctgtactctctgtatttctctccacccgccaaagtctgcttactgtgaatgaaactcattgcctgaggcagcatccctggccagtgcacagggcaggccagaagtgcagagagctagggctcctggaagcagctctcaaccaaggacagacagggagttcgagaatgaatatcccaacttccttttttttaaaaaaaataaaaaattttatttagacagggtctcgctctgtcgctcaggctgaagtgcagtggtgcgatcacggctcactgcagcctcaacctccccagctcaaacaatccttgcctcagcctcctgagtagctgagcctacaggtgtgcaccaccgtgcctggctgatttttaaatattttttgtagagacagaggtcccattatgttgcccaagctggtctcaaacttgtagactcaagcgattctctccactcggcatcccagagtgctggaatcacgcagcttccttgctgttggtgttgatacttggaggtgtatcttctaccctgtctcgcctagttccccagcagggtggagttctagttgcctgcaggaaagctggcttaatgcacccagtatcctgccctgccttcctgctccctcactgatgtttcctgggtcacttcccgaataagctacctgcatctgaattattttctcacagtctgcatctcggggagcccaaaccaagcctcaatgtgcctagagtgggggcagctgtggggatcacatgggtgaggatctggaaagcactggaggcggccgcatatgcatgctccatggaagcgggcactcccacatcgtggctccagttccccagccagaccatgcttcacagtcgcgtgtctgctcctgctgtgccctctgcctggttgccttcccattcctcttcacctggctcatgccaagacatccttctggactcagctcagtggtcacctcttcttggaagtcttccctgactacgccctgtgcttggcttggcaggggggatccctcttcagcatccacataggctccttccactgtcatggcatttacacccaggattaccatcctctgcgggctgccccttctccccacttattctttgaggcctgagaccacatttctttgctgcccagctctctgggggaggaggtagcccaggtgtgaatcttgtacaccccttagccctctgctccctgtggcctttgacctgtgtctgcacacaggaacccagcaaacgtggcacaatgagggcttagcatccatctgaggagagcacgaccagagtgaagcaccccagtctccatgccttcacaaccttttctctttcctcaccacctcgggggtcacccagcaggacaggatgctgggacaagtggaactgaaggctgggcatccaggctgatgggaattggctttgagaaggaaggatcttaagctcaaggtctcatctagtcgggaggaagacagggaggaggagagagagagtttaaagctctgagaccttgctttgtcttgtttctatttattataatgactactgtcattattatgtaatgaggtgaatggtgggccaaagttttgcccacctgccaatgatgaaaaagagataggttgactttaaagcaagagaagctgcagtcagacaaaagaaggaacttcccactttctggttgagcagggttggctgtcatcaagttctcagcaggcagagaacttgctggaacacagggatgtagggcagggggttgggggagaggctgacacacagaggacagggaggatgctgtggatcaccagtagccactggggcaggaagaagcatatgactgagagtgagggacctggagagctaattctctgctctactctcaacttgctggatgactttaggcaagtcgctttacctctctgggcctccatttccttatttgtaaagacggggacaataatacattcctggacaacatctccagctgtttcacaagttattagatggacatacactttatacaatttaaagcacagttcatggctgggcacagtggctcatacctgtaatcccagcacttcggcaggccaaggcgagccgattgcttgaggccaagactttgagaccagcctgggcaccatagcaagacccccatttctacaaaaaatacaaaaatcagccgggcatggtggtgcatgcctgtggtcccagctacttgggaagctgaggtgggaggattacttgagccccggaggcctaaactgcagtgagccaagattgtgccactgcattccagcctgggcaacagagtgatactgtcgcaaaataatttttatatgtatatgtatatataaaataaagcacagtttggatgaaaaataaacaaaaccaaaaccaacagggtgaggagagaaggtgagaaacaagcacgtgcttctctttctctagcaatccgtatcaggacaaggggactccatttaatgaacaactactctatgactagcacctataaaggccttaatcctcacaacagcctatgtaggaggctcgtctccattttacagatgagaagactgaggcccagagtggtcaattaactggtccaaccgggattagaactcaggcctctctgactcaacgccctggcttgttccgcctttgccacattattggagctgtgatggtcagatgttctacccttacttgatcacctgatggttcttctccccctgcccaaaatgaagattaggatacaagacccaggaagtcttccctggccctcgggccctccctgccccttcccagatggccttggctcaatctgggacttcatcatccacccaaccaggcctcagctgagaaggagccgggctctgagcccaacagataaaatcccaagccccacagccaatcctcgtggcctggccaggcattaggcaatgctaattgcactgtccacagtggagccttgtttgcatatatgcaaattggggggctgattagcgcttcccccagatgggtcagttcaggcctctgcctgacccctgtactgcctggtttaaagcactagcgagtgggacaaatgcccatccagatgggagatgcagcaagcaggggcggcctgtggcctgggcagcccccagtggccattgcctggcagctgaagggtccaatcatgacctgagtgtttggatggggaaccagaggctgtggtcacatgttccccaagtccctacccaaagggtctggcctctccaatttgggggaccccaggatgcccagagccttccctgggccttctctcagggacaggactcatgagcctgaccccacacaggcctagtaacagcagatgtctgcggttcagcttccaaggctcccgcagatgagtgggcatctgtagaggaggaccctgggcctgcgtccttgagctcagccaggcagctgcttggagtgcagccgtgatttaatctcattgggcccttctgtcgggcctgggctcaggatgcggagcttcaggacttctgtgtgctatcccccaccccctcggctgtcccctttcaggccgggaccctcatctctaggctggatgacacaacagcctggaccctgatctcctgcctccgctcttcctctagacagtcccgctgagcttctcaaatcacaaatctgagcactctccctcctgcttagaactctccatggctccccagtgcccagtcataaagtgcaaactcccgtcccagcccatgcccatggcatgggtttctaatcctcgctttccttgtcagtgtccagctccccacaccacagacgccttgtgggggtggatgaagtcttgctggagaatctgttcccatggcctggcagagcctggctggactttcagaggctggaggaatcaccttcccagggaggcttcctgaatgctgtctgtgcgacccctggatttcgtgtctttcagaaagtcctctgcacacaggtgacctggtaggcccgtgccttcccttctatgtctctgttaaagggttctaaagtcccttctctgggcgaggtcttgtctttctgtttaggtgggagctcttaggtggtaggggggtgagtggtgcccatcagacttggattctctccccaaggcaggagctgtgactccccgatcagactgggacctcaccggggctggagctatgactctttcatcagatttgggacctccccagggctggggctgtgtctcccctatcagattaaggcttcgtgatggcagaagactgtctccctgcatcagagtgggagccccctgaggtctgtgtccctagaccttgtcacatttccaccttaggggaatgtcagtgtctactctgttccgttttctgttccttgatgtttccacgtggtcctctcggggaggaggcatgcagaggaaggaggacaggccagcaggagcctctgctcctcccatcttctccttccccaggcctggcccacagccccttcccaggacagagcagcaccttggtaagcctcagtcgagttggaaggattgagtccacaggcggctcacagacctccatgccccgctgccccaggctaggagccaagggccccatgcccccttggactcagttccccaggtcccacccagaggtagggctacccctagtcacctccctgcccaagctgcctgtgcctgaagcagctgttgggctctgcccctgaccctgaagagatctggcccacctttccttccatttattcctctgcccaattctgacctagcttagcctgggtccggaaccctctggaagcacctaggtccagtcctccagtcccctgaagataccactaggtagtactaggtgacttggtctaaccagagaagcctccagtaaatagagccccttagaccaccaagaaaagctgcccaggacccttcaaagccagagcacgttgctgatctgagaacggtcagccagaacctcccccttgtgtcagcagggccactcggacagagagggttgagagccagaccagaaggacagagtgagattcctgctggggcccttgttcttcgtgaccttgagtaagatgtttaacttctccgtgcctctatttccccatttgccacaacttgacgattgtggtgagaataaaatgagatagcagaagaggagcttccctgatgagtgattatgatgggtgagtcccgggtgcctcaaaaagccttcctccctgctgttttgaattatctgactccaaaagataactttttttattattattccaaaagtaatacccgaaagctggagataatttgaagcgtttagaaaggcacaaaaaagaaaatagcatgactcagagatgactgctgctcgtggcatggtgctgaccctgtcagccttttctgtgcgtggggacagggaaccgtggagggaaacagagaggaatttatggaatattttttaaaaagttatcctcggagtcatttttgtggctagatggctcctccccacctttgttccctgacccttgtgtgggtatctgaaagctgcccattaccctgttcttgccaccaatttcctcaattcacactccctataaaccaccatggggagctttataggcccacaaaggcattcaaagttaatggcaaaaccaaccatgtgaaaactccgctgtaaaatccacctcactctctccccagtgcccgagagcccccagcccctcctggttcccatgaggcagcctgatacctgccgccccaactggcactgggccctgggacagagggatgggcaggcagagagtccagggggtgaccttctttccaccgaggacacgaagcacacacatcctcttgccacaacaacacagatgcaataaatacgaggactgtaatttatgtagatgttttgaagtccaaacagaagggtggggagggactaataaaatgccatccctcatgtcggcttctcagggcggcaaatgtggcaggttcataaggaatgcgcagggcacctgccggctgagcgtggaggttagggaagtccaaatgatgcccttgggctcccctgccaaggtcgacgctctgccaggggatggagcccagaaccaggaggaactttggttgctcctttattcctccttccaagaagtgtttccaggctctggctcaaaccctcctgggcagaaagggacaggagcctagcttggtcttttaggggagaaaagtgtggcttctgctgggacagtgaatgaagagtgggcttggcactgaccctggctctgctgtgtgacctttgggcaaatacctcaccctctctgatcctgtttacatatccatctaaaggagagaaaaaggagggtattatgaggattaagtgccatactgtaaggaaacaggcagagagggaatatgtaatcaatgccagtttctccccactctccattagtttccgaatttcttgcaaactgcaaaggacagatctcttgctatatttgtgccagaacaccgagtccaaagcactgggcctagcagggagtgagcgtccatcagtttgaggatggtcccttcctctgctttgtaccaagagggggatgggtggggtgcagtatggaggtggggcaacgtgagtctattctgggccatgtcgttggctcagcgggcgaccttgactgagtcatttcactctcaggagaggctggagctgagccagtgcaccttctcctgggccctcctgggatcactgctccaacgcagggagggattgggacagtgaagagtcaggcttctccccacaccagcccaaccacatgctgcccacacctccactcccttaggggagaagtgcctccttttggtcaaggtagtaggagaggaactgagcgttcagccttgtttgatatgtgagcaaactggaattggtttctggccaaggttgtggagccaccgagggtcccgggtgagaccagaatcagttctgacgtgcccctctccccagcctttcttccacatttctctcttcatgacgctctcccatctctgtcttcatgttctatcttaattgatcctcatagcacccctgatatgtagatgaggaaagtaagactcagaggggttaagtgacatattcaaggtcacacagctggttaatggtagggtaagaaataaaacacatgccttgtagcaaacaccaaaagtaaaaacatggtcaccctgattccttgtctgcccttgctctctacgcctggtccaggaacgagttctggaggctcttcccccaatacatcctgcatctggatgacgcttccctctgacgccactgccaccccagcccaggccaccacgtgtccacgcctgccatagcctccctgctggtcttgcggctgccaccctcatcatccagctctccaggtgtccagagagatattattaaaatgtaaatcagatccagtcgcttccgggcttgaacccctccaaggtctgccatcgtgcttgacatcaaatcccatgccttactctccttcctctggtggtgcctgctctcccacctcaccctgtttgattctctcctgtgctcatgccactcccaccactctggcccgcttgctttctcccaagcgtgcttgtccagcctatgggcctttgaactcagagcttcctccgcttggatcacccttgctgggatgatcctaagactacaaccttcctgtcctgcagggctgaatttaaataaaaagcaccgagaaataccttccctgacaccaccccattgaaatgtcacctccttcccctattttccctttatatgaatacatctgagccatctgtcaggacactgcttgctagcattaataattttgttggtttttttgctcatcatctgtttccccactagaatataatttttgttgtgactatgatgatgaaacattgtgtacctcctacataccaggatggttctaggtttgcatatacataacttactgagatttgcaacaactttgtgaaaggtactattattatctccatttttactgaggacacttgatatggtttggctgtgtccccacccaaatctcatctttaattgtagctcccataattcccatgtgtcgtgggagggacttggtgggaggtaattgaatcgtgggggtgggtctttcctgtgctgttctcttgataatgagtaagtctcatgagatctgatggctttataagggggtgttttcctgcagaagttttctcttgcctgccgccatgtaagacatctctttgctcttccttcatctttcgccatgattgtgaggcctccccagccctgtggaactgtgagtccattaaaccattttcctttataaattactcagtcacaagtatgtcctttttttttttttttttttgagatggagtcttgctctgtcgcccaggctggagtgcagtggcgcgatctcatctcactgcaagctccgcctcctgggttcacgccgttgtcctgcctcagcctccagagtagctgggactacaggcgcccaccaccatgcccagctaattttttttgtatttttagtagagatggggtttcaccatgttagccaggatggtctcgatctcctgacctcatgatccgcccgcctcggcctcccaaagtgctgggattactggcgtgagccaccatgcccggcctcaagtatgtctttattagcagcatgaaaacggactaatacaacactgaagcccggagaagctaagtcacttgcccaaggccacacagctggctagtggtaaagctgggatttgaactcaggcagtccagcttcagcgtctagactctggaccacaacactaggctgtaaattgcatcaaggcagcagccaggtctcttttgtttcctgctgcatccccagtgcctagtgcaaggcctggcaccaggaaggtgcacagtagatgtttgtggagtgagaggatgtgtgccacggtgagtaagcatagaccctgccctcagagatatcatatcatcgcttatttcattgctcagaagacacagggaaataaaaataagaagtggaaaaaacaagcctgtataattcaaagcataaacatgttatccttgaatgagtgagattgtttgtagtcaagtacagagtagccctcctgcccctgcacacacaagttagtgtcttatactcattaaaaaagccggagcataaacccagtgcttgagctaagtgtgcacgagttcttacggtgtcagcaagacgtgctcaccagagtgtgtctggcggcatcccggagactctgccaggctaagtgcatggagcagggttcagaggtctgcatgctccgtagtactcctgcggcccaccttgcctggacaacagctgggacaggcgtgtcactgacatgtgtgcctgagcccctctgtccagcctggcacagcccctgctggccaatgctgggacatgggccagcagcctgcagagggtgtgtgtggccatggtgggtaatgacacgtggagagacagaggagcgctcggtgtgcaggggagaccatgggagcagggacagtctccgaggcttcggggcaagggactgatttaagtgaaccatgcacagcggggatgacacacacagagggagggggtggccatcccggcacggttcagaggctcagactcatggctgtgctaatcattagtgtcaataccgtgaatgctggcgaatcacagagctaatgttgctaataataaggggtgatatatcctgactcctcagtcctggctgggtgcccggccagcaagacctgcctccccagtaccgctcagctaaatggctgagccactcgtgcatgagctctctcggtggcaggccagcctgacagcttggcccaataggtcttcgtaacatgggcagattgtggaaatcctgggtgtttttctgaggcttccttcggggcaggatcagcctggcttcactgatccatctctagactctggctccataatttttcggctttgtgaccttggggagtcatttcccctcccccattgtttctgcatctgtaaaatgagaatcattcatgtctactataaaaggtagatctggggagcctctgggatgatgtggaactctgagcagaatgccaagcgcaagtttcaccatacgctaattattattataataattacattttcatttattcagtagcaagaatgtaggctttggggccggggagtggtggcttatgcctataatcccagcactttgggaggccgaggcaggaggattgcttgagcctaggagtttgaggccatcctgggtaacagagggaggctctgtctctgcaaaacaaaaaattagccgggtgcagtggctcatatgcctgtaatcccagctactcagaaggctgaggtgggaggattgcttcagcccaggagctcaaggctgcagtgagctatgatcatgccactgcactccagtctgggtgacagagtgaaagagaatttaggttttggaaccaggttgagctggggtggaatcctctgctgccacgtgctctaaggcctgggcctctctggaaaatggggatagcaccttccttacggaggctgggaggattggagacagttcacttgtaacaaggaggatggtgcttggcatggcggggggggtctcaggatacttaaggtagtttataggttttaactgagttcctgccgtgtgcagtcactgtgccctgccctggagatacctgtccccgattctgtgttagctgtaggtgtttgagtcagtgtggtcagagacaggaatgctggcctccttggagatgggcttaaggggctaggcgagaccggtaacttcatacctacttcagggccaggaagtccacatacatttgacccctttctcctccttgaattccagaggggactcaatccatctcagcacctcccagggagctgagagccctgaagtcagtgcagtgtcctccgtcaccaatgccatcaagataccccatcagggactccagcactttcactggggcagttgcccccctcaccaaggtctctctgagtgggatcacaaatgccattacactctggatcattctgctggtggggcaagagtggcccctgagctgatggggcggccctagccccaaatccctgtcatgtccattaccacatcagcctcccagcttagtgccatcgggaaaaaaagcaggggtggtgcctgtcccagttggcaccagagaaaacaaaggctcaggcagggtatgtgacctgagcaaggtctccggatggctgtggctcagccctgatgaatcacagaatacctgagcgtcccagggcctctacccaggctgtatcctctgtgtggagggacctttcatcacttcatttaggtctctgttcaaatcttcccttgtcagagagtccttcatgagccacttgtcacagtcagggtaattaacactagctgctgtaacaaacaattccaacctcttcttgacacagcacagtaaaagtgtattttttgttcatgcaaaatcaaatgcatttattcctggtcagaggctcccctgagcactcacatccaggcaatggttctgggggcccagcctctttcattttgtgcctctgtcatccctgggaggttccccgctggatcctctgtattcagtctgctgaagagtgaagagaaagatcacatggaggctctgacctagagtttcaagggccaggtccagagtggcatataccatcgacatccacattctagtggccagagcaggtcacatggccaaatccaacactgatggggagggacagtgcatgccacatataacaggcgggggagaggagtgaataattcacaccatggtagaggatttcacaggatgtctggggccaggcctgggcgacacttattccctgcttccatggaccacaactgactcacacatcctccttaactgcagggggctgtggggggcgggtcttggaaatacggagaagctcatggatattggtgaaaactgacagtttctgccccacaacctagtaattaaagagatcctagtagtgcttctcatcatgtgggtgaccgtataattcatcttccaaatgggaccattttaaggtgaaaggggtcactaatgattatcctctgaacactgggtttcaagcaggttgctccagggatttggggcacgtggtcaccctactcatcactctgcatcctctcagcctgctttattgttctttttcacacttaatcactgcctaggagtggactccgtgaggacagggacctttctccctctgttgctatatcctcagtgcctagaactgggcctggcacattagaggtgcccattatatgcctggtagatgaacgaatgaattaactcaactgtctcacagattccttttgaggaccgactgcacattcatccacagtgctcctgccctcctggagctaagcagatgtcaaatgagaaagggtgatgtccaaggactccagaaggtcatgcctgagtctggaggtggcttcaaggttttaactgcgttccactgcatgcagtcatcgtgccctgccctggagacacctgtcccaggattctatgttagctacaggtgtgaggtcagagcagatcccttgagaaggtgatatttgagccacagatctttagaaaacacagaccatagactcagttccaaacagtcttgagctcacaatttggtttggccttttgggtgctgtgtaagcctaggtgagtcacttgacctctctgaaccttagctcgctcatctgcaaagtgagaccaggcatccgaacctttgcagggtggttgggacctagtaactggtgttgattatcataatcatgatttctcttatttagattttagacttgaagctccatcactatggagcttggtctctggccatggagggaccatgaagttttgcccttctcatcatgcattgttataaagccaactaaggacagctccccagttcctagtgcccagagccctaaataacaagatgccgcttcttcacgtagggttccatgatctggccttagctctgccagttagtagctgtgtaagtctgaacagcttagcctctctgaacctctgtttccttggaataggaatatccaaggctatcttatagggtacaggtgaggatagaagagataatgcagttaacaagcctcctacagcttctgcccatagctatgatggaaaagcacgagggttgatgttgattgcttgcagtgtgccggccaacaatggtgacagccccaggtttgggggctcagtgttcgagcccccaagggcactcagattctgcccagcagcagccaccacagggtcctgaaaggagaaggtttgctcccagccgctctgctggcttagaacaggcagtgggtggtagggaggccaagagagtgatggaggcattcccgggcgttgcttcagcttcactgtcaaccatggaacagttatagatggttttgtcctcttggagatgtccatcccattagcatccacacacggccctaatgggcttcagaaggccaatgccaacagtcttgtcttcactccgcagaggaggccccagccagatggatggagcggggctcagagctgctcagacatctgcaatgtagccccagggaactcaaaaggccccaggcctagggctggaccctaagcgcagccaaacccagtgacttggctcaataacaggcaggaagaacaaggcacagtcactgctcataaaacagcagcagccacggggtggatgactgactgggaaccaggtgccgaaggtgaattttctcctttcatcctcaccatcctatggacttggtgtgatgatctctacttcgcaaatgaggcaactgagggtcaggagagtgaagtgatcatctgtggtggtccagctagggatggcagaggtggtggggtggggggctggggacacgaagggaccaggacttgagttccgttggtctgagccccagatgcatgctgtccccgattccccacgcagcgtctgcgaatccatccccactgaaccaggactgtccagctgcatctcatttcatcagctgctgtggactggaacccctcatgcagccctgagcccatgtgttcctttaaaaggtggagacactgaagcccggagcagggaagagtcttgcccgcatcacacagtgatttaattgtaggagccgatccgttcctaggtctcaccaccttatctgcatccgtgggatccacagaccactgactggcatcccaggagccacggtgagcccactgtctgtgtgttttagttaattttctcacctttaggtagaacatgcattcctcgcttcaccccagtccccacccttccctatcgccttcacctgggctgatgcgctcatttgcttcgctggcctgatactgtctgcatttgcctctctgcctgggctctccttacaggggacttggatgggatttgatttgagtgcttttctctctttcttttgtcatctctttcaaggccgcgagtcccatctcccattttacatcttttttttcagccctctttcctatatcaaaacttccccattcaaagcttcacctcctcaggtcttcagactcagtaaaggaaaggagatatcagtgggcagccactcagtcttcttggctcacggaggctgggatcacccctgtcacccctgaccctgtgctgggctctgccctgagagaagctcacatgtccccagctgcaatggatctgatgctgagaatgattctcatcccaggcaaggaggcccagggcagggctgggtgaggaggccctgccctgggagagcagtggcttctgggttagaactcacttgaaggatgtggggaggggtgggggtggggtggattccaggcagagaacacaagagctaaactatttaggctcagagaaaatggagttgctttgtgtaaccaaattcgtcctctcctttcccctccctttccctctttccctcccttcctttctcttcctcccttcattttcctttcacttccctttcacttccctagaggaggggttccttggagacccttgcaactggctggaatctggaaaaatcctggaggactgtctggaggaagtgtgaatccagggagggcagactgtgaagtgcaggaggggagcaggggctaggcaaatggggggctcacttatgcctcctgcaggtcccagctgaggctgatatagtcaagaggccagcgctactagattcacacttcctccaggcagccttccaggatttttgtagattctagccagtcacaagggtctccagggagcctctgcttcctgggccccatggcactgtgcatgcacttggattttgtcacttgcctttgtcatttgcacccgcctccccagctgtgaccccttgaaggcaaggctgtcctgttacacctggcacccagcacgggatgggacatagagagagcctcgcccctgcatggaagctgtcccatgagtcctctgagttttggccctggctctgctggtgccatgtgacttccttgctgagcctctgctcctgcatctgtaaaatggggataaggatacctactttgtagggttgctataggaataaccatccagcccttgtgtaccatgagcttggcacctctgaggcagtcaaccaactggcttgagagcagtcagaaaaaggggtcccacccaggctggctctccagccccctccaggggcaattctgctgagctcacgaaggggaagaatgcacagcatgcagggccccgggtgcccaaaaagctggggtgcctaacagagggactcagcccctcaaccaagtcataggacatagagaccatcttggcaagcctgaaatcaagaaagacagccaggcttggggaactggtgatgaactgctggtgcagtgttgaggggagccgggaagggctggaagagggcaagccagcaccccactctgttgaaggccagacaaaggctgggccttccaggaggcctgggcgctgacctggggtgcgccatgctcccatccctgcgggatcaagaacgggaagctaagaagtgtggtcggtcaggaggctgagagcctaattgattaaagttgtacatgttttgatgggcccggatgcggtgctggcgaaaggtgaagtattaatacatataatatataattatgatgtgccaccggcctggcagcctgtgtaaatagttacccagctggtagctaatcccggtaagtgggccagggcacctctcacacgcgacaggctggcttctatcctgcggggagggcctgggcttcacctggacttgtgtagccctagaggaacattctgatagagtgggtgggcatccagggctggggctggcacttccaggggttggagtgtctgggctggcatggaattctccactattaaggaggtggtcatcagggaaggaaggaaaccaggctggaccgggcactcctcactggctaagccctgtgcccactgggcactcctcgctggccaagctccgtgcccacaacctcacacttcatgcccactctgcgtctcctcctcttctctctgcagatggagaaaatcagagaggcttaaggaagcacagcaagtaggcgacagggctgggattcaaatgcagtcccctggctctaagcccgagtgctgtttcttccagaaagcaacaacaaagccactgtccccgtccccagccccaaccaagttcactcttgctgagcccccaaaaggattcccattgatcccctgtactgaggatacggagagaggtctgtggcattctgggtctctcctcttaatttagctcaaatgttgagaaaccagagaaagttaagggaagattccaaacaagttgagctgccactaacagccagctctgaggcttttgtctctgagtgtttacagcccaggaagtctggcatccactgcaggtgaccgggcagggtgcaggtgtgaggctggaagtgagagcggacagtgggactgaaatccggactcagcagttcccgtcaaaaagacattcagactctcccagcactttgaggggcggaggtaggtggatcacctgagttcaggagttccaggccagcttggccaatgtggtgaaacctgtctctactaaaaatgcaaacattagccaggcatggtggtaggcacctgtaatcccagctacttgggaggctgaggcaggagaattgcttgaacccggaaggcggagtttgcagagagccgagattgcaccactgcatgcactccagcctgggtgacagagggagactccacctcaaaaaagaaagaaaaaaaaaagagacattcagactcaaaataactttctacaaccctcactgctgctgtgttgctcagtccagggccccagactccctggtgcctcgtggaatttcagaggggcagtggggcttctagctctttctttggagggctaactctgcctcgctgtctgtcccctggccatggtggctcacctgcctggtgggtaccccaggacctcaccctgtgagccactctgggggcagctccaggagctcaggtttactgctccccgccaatcccctcaaggtctcggtcatagccacaccatggccctgtgcgtgtgtctgtctataagtgagtagttttctcccctgcctccacgctgcagcccacaagctggggactcccaaggcagggggttcattcatctctgtggtcaccatcgtcctgttctcaacgtgtccgctctgactttctgcctcccagcccggtctggtacacacgttaagcaagactgcaacctgcaagtccagcccgtcttcctcccagctgcagccactaatgggatgctaagtgcctattttgcagatgaggaaattgcaattaagagaggttaaataactttcccagggtcacatatttggttcgccactccaacaccatgatgtttccactccatcagattgcctctttgctggatgagtcttggaggggaggggtgtttcctccatctgactcagggctcccatagggtctcctccatcagagtaagcatttgctcagagcaggaactctgtctctcccactagactgcgagcttcctgagggcagaagctgtacacctcccgtcagccagaccctcgaaaggtagaacgtgcatctcctccattacactaggaatatcctagtatagggtccctggggacactatgaaggtcatatctcccccatcaaactgggatctttccctaagggcaagctcagtggcgcccccatcagactgggagctccctgagggcagggactgagtctgaagtccttcaggatctcacacacctgccctgtcattccatcccccgccttaggaccccctgccatggcacccctgatggtgttcacatcctgcacaggactcaccctcagccggagcagaagctgccaacaggccactaaaccacagtgcaccctcggcattaattagtgttgctgctgttaagtgtttcttcccatttatgcaaatcagcgaggtaagaggcatataatgaagtgtttgtggtttaatactgtgcggtaggaacgaagaggaattttaattactgactcctaattggatggacggcttgttaatatcctcctgacaggacatctgagtcacttctgcccacccacccaggcccgggtgtctgctgcccactcctgaccagggcagcgtcggggaacagtgcctccagaagccatccttgctgcccttgcccaggggtcattcctggcatccctctgcccttgactttggagctcctgtgtctttcaatctcttttcttctctctcaatctctctgccttcagaaggccctgggcttgtgttcaaatccccattctgccacttactgtgtgaccctggacaagtcacttcccatctctgagccatgttcttcaggctaagtactggatatgggtgataggcattgagaaatcagggaggttatgtagttagaaggttatgcaccctttcagagaagggtgggaaggtcctgcccaggcatagaatctggaggagaaaagaatgtagggtgtgtgggagagtctggagatgggcgttacccccagaggtaggaggtgctgagggcgattccctcccactcatccttcggggctctgctagggtggcacctcctcccagaccctcccaggttccctggtgcctgtgttgagagtctctgccttgggtttggtcgcctctctgcccatcccctgaccatcacatcgtgctgtcactgtacccattagactatgagttcctccagctgttctgttctattgacccactagcctggtgtccagcacagctccggaacctgagaaaaatgtgctcaatgaaagatgatcagtaggctggacttgtctgctgaagatgctccaagtcagggtgcagtttggattctagagaaagcaggcaatagggagccatggaggactccgaacagggggccgaagaaatgttagaatcaatgggcccttcacagctccctctgccttctctcggattcacctgctgatatagtttggctgtgtccccacccaaatctcatcttgaattgtagctcccataattcccatgtgttgtggaagggactggtggttcccccatactgttctcgtggtagtgagtaagtctcacgagatctgatggttttataaggagaaaactcttttgcttggttcttgttctctctcttgcctgctgccatgtaagatgtgcctcttgccatgattgtgaggcctccccagccgtgtggaactgtaaacccattaaacctctttttctttataaatcacccagtctcgggtatgtctttttttttttttttgagagagagtctcgctctgtcacccaggctggagtgcagtggtgtgatctcggctcactgcaacctccacctcccaggttcaagccattctctgcctcagcctcctgagtagctgggattacaggtgcccagcaccacgcccggctaattttttgaatttttggtagagattggatttcatcacattgggcaggctggtcttgaactcctgaccttgtgatccatccaccttggcctcccaaagtgctgggattacaggcgtgagccaccttgcctggccctgggtatgtctttattagcaacgtgagaacagactagtacagcttcccaatgaacatccaaatcttgacgtggtccaggtcctcagaggacaaattcagaagcatttctggatcccctaggatgggcagagtggtgatctttgggcagggccaggctagggggagagaaggaaggaaaaacagtcacttctcaccgaactagtttaagaagagttataaccagatagaaaagcctcactggtctcactctgctggagttagagcctagctctgggacttaaccagctttggggtccttctgagccttcctatacttatccataaaacgggctaaacctactttatcagatgtgttcagagaatacatgacataaagcacttcaagcgctcacagcattatgccctcatgcagtaggtgttcaacaaaaggcagatgttattatagttagatttcctataatggcaggcggtgagctctcctgggtgtggcttcctggtgacaagcccaggtgtctgacttaaggcacacttggctctgcactttctagctgggcgaacttgtgtgttttctggtttaagtcataatttcttttctggtaacatgaggatcgtacagtacttcctcacagggtctggggaaggaccgggcactcagagcgtgctcattcggtgtgacgatggctgctcctgtcatagtcattataacccactgatggggggaactaaaccagcagcttccccattctgaacttcagcttccttgttctatctgggaatcacagtccctgcacccgcagccacccagaatcactgcagtcagcagatcctattgctgacaagccttcctaaactgtagagtgctggaccaatgtgggctctgacggttaggaccacagagggtatggagggtggtggtggccgttcctggaggctgacttggcctgctcgagatgggaggtgactgtgatccatgtaccccctgcatcctggaagacactgggaagtcattatgggtgcaggggaccaactgtagagctttaggcctctgttcctgctggggcctggccagggaatctcttgggccagagtttggcctccttggcctgcacttgagatcagcaaactcctgaatctcaggggtccaggtaaggaaagaaaaccccgtgactcggccctctcccgttttagcacggccagcctcagcctcctttctccacagagtccctacggggccctcccagcctccactggcatgaacgagaagggaaagccagcattcacacaatgcctgctgtatagagcaggtgcttctctaggcactattaccatccccatgccgcagaggagcaagcagaggtggcttgcggggatggtgctgtgaatgacccttggagataggtcaccagcccaggcctgcctgattccaacatcgtgccctgtattctgagcctgcaaatgccagcttgagtcccagaactctacccaggccaccaaaagccttatttaccttccccccagcccactttcctgggcttatcaggcagaggccgaagcagctgctcacattgcaagcgcccattccaagtatcccaccggtgacaggagaacaaacaagcctgaaccctcagcaatcccctggctgagaggcctgccagagttttcaaaggcgaggaaaactatgaaacggggttaaacaaacacatgtttgaaaggaaaacagatgccagacagatgtgctcccaacttacactgatacagtctcgcgtggcggtgggaggaggccaaatatttatgaagcatttactgcaaaaggcaaagcggtggagcaaaggcacagaggcttgaaatcaagcagatgaagcagacctgggttggaattccagatccccttggagggctgtgtgaccttgggcagggcacttaacgtctctgagcctctgttttctcatctgcaaaaggggatcatcatacccttcctatagagcaaacttcttaatatacaggtggtccctaacttacaatgattcgatttcctgtttttctttctttctttttccttttccttttctttttttgagacagggtgtcactctatcacctaggctggagtgcagtggcatgatcacaactcacaactcactgcagcctcaacttcccaggctagggcgatcctctcacctcaacctcctgagtagctgggactacaggcacgtgccaccacatgtgcctgtatttttgtatttttttgtagagacaaggtcttgccatgtttcccaggctggtctgaagctcctgagctccagcaatctgcctgcctctgcctccccaagtctgggattacaggtgtgagccaccgcacctggcccaatttgccatttttctactttacgttaatggtgtgaaagcaatagccatttggtagaaaccatcctttgaattttgaattttgatgcagtgggaaactccctagcagtgccagacagcattagggagctgcagctcccagtcacccatgccatcaggacagtgatacactgataccctgcagcttactgtggtgcaaagtggttttgcccaatatatgccgttgtaagtgttctgagcacgtttcaggtcagctaggctaagctttgatgctctgtaggttaggtgtactaaatacatttttgacttaggatattttcaacttaagattggttaattgggatgtaactccactgtaagttgaggagcgtctgcatattagggacatagcgtggggcctgacatatgataggtgctcagtaaatgttagtttcattccctttattagagggtttagcaagctgagatatgagaccgtattcaccctctaaaccaggccaaaaggaaggagccgctctcctggggacaatgatggtaagtgaggtccagaaggcagaagggttgaaacccagaggagtctttggacttgggggaccaggatcatgttctgtgaacagtgatggtgtcacattgggggtggtagacggagggtgagttggagttggccatgcaggatttggacatggggaggttaaattaatccccagtcattctagggtgattcttctgaatgaaagatgtttccatggggcttgggggcacagtggcagaggccgggtatcgtattctggggttaagaccttggacaaatctgcttcacttctgtgagcccgtttcctaaactataaagggagaatcatgatatttaccttctggaattgttgggcaaaaaagaaaaaaaaaaggcaatgtggcaggccggtggtgactactcagaatagtggttgttattggtggtggtgttaatgtcgcaggaggaggtatggcagatggggtggtggacagaggatgagttgcagaagggataaaagagaaagaggtgagagggtggagggaggagttagtgcaggatgggaggatggatgtatctgcctctaaatcccaatttccttggcacttgccgggaggcggtttcttttgcaaaccatgacacatttgcacagggttagagcagatccccaaggctctggacaaggctgcacagctacatttcaggtacatcggtctcggtttccccagcaggagacaaggctcctgagataagcctatgctgtccttttcatccactctatttgtgctagagacctgcatttttccaacttccctgcaaccccattggtgcagccagcattggtgggtgggaaaaggccccccaagctcctgcccagcgcctctttggggtgggagaagggaaggaacagaagtgcccaccaatgtcttctctgacttcactgtgtcttcacagcctaggggcactgatggatttagctaagtgctcataacttccaaaccaaaagtcagagctcaggatctaacaataacgggtgttttccaattcctgaaaaatgatttatatgaaaagggaaataccgtgatagccatcatttatatgaaatgcaatttagttactgatttggtgaattactggaccacaatgaacgtgaaaagaagtagagaatccaccaatgggagactgcccagtggctgacacatggaggataatgatgatgacaataatgatagaacagcatactagctccatctgtatagcattctacatggcatgtattatgactgctcccttgtacagatgaggaaactgaggcataggcaaggtaagtaacttactcaagggtttaggactaataagtagcagagttgagatttcagcctgggtttgactgactccagggcacaagtttttcccttccttgctccttccctctcccctttccttctttcttccctccctctcttccttccttctgacccccttctttccttcctttcattcttctccttacctcctttgctgtccttccctttcctgtctttccctccctccatccatctttcctttttatccttttctctcctttctttcaatcggatattgataaattgccctctacagaggttgtacaatttacgctccccccagcaatgttggagagcctcaccctgttctcccacaggcttgccaaacacggtgtcagcaaacacacaccttaggaaatgttgcccgtctgatcagtgcaattttaactgatcgtgaaggaggttgagcatcttttcatatattgatgggcaatttgtatttctttcttcgcgattatctttcatactttttgcccatatttgttcctttgttggtattttttcttttatatatatatatatttattatactttaagttctagggtacatgtgcacaatgtgcaggtttgttacatatgtatacatgtaccatgttggtttgctgcacccattaactcgtcatttacattaggtatatttcctaatgctatccctcccccctccccccaccccacaacaggccctagtgtgtgatgttccccttcctgtgtccaagtgttctcattgttcaattcccacctgtgagtgagaacatgcggtgtttggttttttgtccttgcaatagtttgctgagaatgatggtttccagctgcatccatgtccctacgaaggatatgaactcatcattttttgtggctgcgtggtatttcatggtgtatatgtgccacattttcttcacaatttctaggaacttttcatatgttgaggataacattcataataggagtctgtatttcttggctagggctgccatagcaaaataccacaaactgggtggtttaaacaacagaaatggtttttcccacagttctggatgctggaagtccaagatcaaggtgctggcagcgttggtttcttgtgtggcctctctcctggacttgcggatggtcacctttttgcggagtcctcacatggtctttcctctgtgcatggcaatttctggtgtctcttgtgcctccaaattatttcttcttataaggacactagtcagagcagattagggtccaccctaacagcctcattttaggccaattacttctctaaaggccctacatccaaacacagtcacattctgaggtcccggggattagggcttcaaataagaattttgagggaacacttctcagcctgtaaagagtaaagtagaggttcttcttcaaagactttcctccccatctaattaagaataaatagtaacttctcttagaggcaaaatttgttcaaagacctgtgctaacatccttaaatatctgctagccgtaataaagaaatcaattgcactttatgttcttagctcccacaatttagcctaaatatttgccctggcatgtttataccagtccaagcaagcattaagtcatagcctgttcctcttccttatttaaaagtgtttttatctttctcagcattccacaagttacttcctccttcctttgttctcttctgcttttgcctcttttaaaaagttctaagttgctagccaatcaggacaaatacaaaatgtgaggtcccattccagccagtagaaaccagacacagcagtaaggtagatgtgtcaggttataaacgaccctgtctcctttgttcagtgtactctcgtggtaaaactgctagcaagtgtaccctttctgcagaaagtaaaaatggccttgctgaagaaattaaatttatgttcaagtgctatttctttacagaaccagggaacaagcattcctaacaagccactaacagagtcccacatatctttttttctgagcttgcttttaaaaaaaattttaccttgtatattttctccctaccctatgcagtatagcctcctcaagtctccaaatttgaatatctgaaatcagctttgctccagaaaactgagtgtttatctttgcctggtttcccctaatttgtcttcagagacagcttgatccagaggaaagggtgtgatgggctttggagtcactttgacctccctggcctgaagtcctggcaattcgcacagccgcagggtgaccttgggcaagtcactctatctgagacgctgagtctcttttctataaacgacgctaataatagctagctggcagagctgctgtgaggacgaaatgagatgatatctctagaacgcgtagctccgtgtctggcccgtcaccagggttcagtatgctgcaaccattgcgattttctttatgaataacagctcgtatttatcaagcatccatggcaccgagggcctgaggggaagggggatgcagagtggggtctgtccaggcatctgctctcagggactcatggtcaggaccatgacctggaatgcatgggccaggccctgctgtccttcaaagcccaaatggggaagggagactcatatctgagccttgtaagtggaagaggattttcacaggtaggaaggaggggtgtgggagagggcattgcagtgggaaggcccaggatgtcccagagcagggaggcaggaaaggagagatcaccttcattggatcacaaggcatctctgtctactcgagagtttctggtttgaaagtgggaggcagcgtggagactctgttgtggaaacaggaaccgtctttacctgaaacaggcagaacacacaagtgtttgatggagtttgactgtgaggccacaagtgcttgcagagggaaggggcacggggtgagcagatgatgttcacgctacacatcgctggctgagcctgagctttcagggagcaagggctctgctggcacggatcgcagagggcttgagaagggtgtatctgaagcaagagtgctggatgatcagagacatccccaagaagtggggattggtccaagggcccatgctggatagaggtggctcagtgcctggccctttacctcatctaatgctaactgcaaacctgcaaggtagatatgaccggccttattgtacagaggaggaaaccaagacttgaaaaggtgaaattgtttacccaaagtccaactaggaactaggtggaggagctgagcttagaacctggggagcctaaattctctgcatgcacccccatgctggttagaaaagggtcttgggtggtggtgaccccagtgaaagtgatccctgtggaaaggcttagtgccctccaccacccacctgccttgccaagttccctcctttcccaccgtgagtggattaggctgagaaggcgtggggtttatggtgagcccactctagagaaaagggccccgtccaccctttccttctgctgctggaacctcattgcatacctccaccctcgtgatctgctggggtgggggagcctatttgggacctcacctccatccccactcctgctgtacaggggagagaagggtccccactgaacactctctgttccccacagcaagtgcagttgtgtggccagggcactctcaggttcccggcgccctgggtgccactccgaagtgtctggctcctctccacagatcccagggccagctcctcctgcacgttcctcattcttctccctgctccacgtgcgccacaaacaccttgatcacctctaccgcaggaacacctgctctccttttaatgaccacattcatggaaggagaacaaccagcttagcatcatggtccaaaatgtcccccaggggctggacaggaccttgggagtccagcaggaccaccctgctgcctttggggtgggggtggggtgaagacacgttaaaccctctgaactgcaaggagggtctctgttgctgccagagccccctcctcgtcactctgctcaccaaggaagagcatctggccgttaacttatatataataacccttaaacgctgccattaagtcacctctcattcttttaaactacccaggaagggagttcagggtgatatacggaggcttttatggctggtactgggcagcttaaggacttagcagcacactgaacacacacattgttgcataaataagaaccactgtaatatcaaagcatcactcagctccatgcctgagtttctcagcagcacagaaccaacatcctgcaccctgggtcatcgtcacttagacaaggggacctgaggacagggtcattgcctcagagctggaccactgaatcccatgatgttaccactgctagatgcaccaggagaccctgtcactttatcgcctgtccctctctccttctttcactcagccttctccttaattacgccttatgttgcaaggggcaggggatggaagaagaaaggaatcgctccctatccgaattaacctgctgcatgccaggcactttacacatattatctcatgaaatgctcgattgtacacagtagtaaaggtgttattgctcatttatagctggagagactcagtaacttgtccaaggtcacccagcttgtaagtgacaaagctgggatttgaaccctgcctatggcccttgcatatatgtcatttgcagtaaacacggggttctggggccggaggggagcaggtgctggtgcaggtggacagccccgaggggccccgaagagccctgtgtgtggaggctttgaaatcaggagtagggggctcagagtgtctgtctgggtttgcagacaagggcacagcactaacctgtggctgctcgcctgcgtggctatgctcacctaggagcacccacttggcaaatggacagtgttaatatttaatgagtgatgatgactttgggggaattgctgtttactccctcagagaaaggctcagaattcacattgggccccaatggcccaggcagagactccccagatcagatccccaccagctggatccgccatggaggcccatctgcgaagtagctttggcgagcgggatccagtgtcaggtcctgagggtggaggaagagcagggaactgggaagtggggcccctgtgcttggggaattccactcatgcctgggagtggttgaagacgaagcccaggcgtatttctttcttccaccattcctctaacccccgtcttgcccacgctaactgggatgccaaccgtggtgctggggtcctctgctctttccaattcacaagggtggcccaagcattccagggctaattccacttcctcataagaccccaaggaaatcacataccctggctgcttccgccccatgtgaggatggcggcacaggtggccgagttagcgagtgtctttgctgatggctgaagccccctgcccccagcccagggtagggagttctcactggcagtcagatgcgcctgattaacagaaatgaaagatgggctaattgctgctgaatatgagccgcttgtttggtagggagagcagggttttcaaatcatggagtcctgggggtgcggggaaggactgtccttggggctcctggtccacagtgtggtacttggcccacagagatgagctgcctgttgatgggggaggcagacaggctggaaaatgcgtggaccataagacaggagtggagcagggttttttggcgggggaggggatctcttactctgcaggagatggaaccgggagaagttcaacagagcagcggtgccaacaaggtatggcaggtggccatgaaggccacagatcttaggaccaagtgcatctgtgttcaagcccaggatctgtcacaagccccagcccacagcaggcgcccaggaagtggtagctgtgagtgccctcattgtggagaaggtaaggagggcattccagttatagggagccacatgggcaaaggcatcactggaccttgatgctgcatttgggggatcctgtgccaggattaaaggatgccagtggcaggggcaggggaggaagtgaggtcagaaagagagattcttgggaaccagacagctagctaaggaatggggtcttatgaagccagtgaccatttctgagtagggattctagaatccagatttgtataagacaaatcggtggctcccaaatggccaactttgaacccctgctggctggctataggccccaaagacctcatttggataatacattaatatacagagtgccaggtcccacttccagagagtctgattcaataggtaagaatgcctaatatgtattaaatgtcttctgcttgctgattttatcctatatattttacttttttgtttaactaatgtaatcctcacaagaatcctatgggaataggtactgttattgtccccatcttacagatggaggaagtaaagcacagagaggttaagcaacttgctcaagttggcacagcagcaattgtcagagctgggatttgaacgtacactgcctgactctggagtccatgctttaaagcacactgctatcccggttctgatgaaggctgaggaaatctcacttggctgggcacacgccctcctgtccatgattcttccaggctgcagatttgagactcatgatcattgtcaaccagtggtcttacattcagagaagacagtggtcagggtaggttgcaccttcaggaagggcttcatggagcaggtggacttaagagggtcaggttatggtggatgcagggaatcagagaggaggacaatctgggtgagaggcatagcatgaacaaaagcaaggaaacagcagacatgcaggcccgtcggggaggctgcctgtggaaggacctgggagtgagactaggtgtgtggaatgagcttggaagacactgtctggagcaagtgtctcggtgtcttgtagcatgctggcctcactctcatgccagtaattgtaagccctcaagatgccttcatttccagagccaccctaggctcagtgagaattgagccatgattaaaaggtcagtccagagaggaggcattcacagattcacaatcctcccaaatgaagactcatccttagggcctgatgggatccctggggtcagagggctggggtcagagggctgcagggcagaacgaaggccagggcacccatagcaacctggaggggaaatcgctcccctctctgctctggaacaggaagtgcctgaaggtccacgattcctggcaagggctaagtaataataggtaaggaaatagtcatgctgaggaaggggtgtagcagagcagctaggaactcagtccccagcgtcagaaagttttcgttctggctctgctgctcactagccacgagtgacttttcctctccaagcctcagtttcctctgctgtaaatcaagaattaatcatgctagagttgtcatgcagaaccattgagataatgcacaatgcttatcacaagcacttaataaacaaaagccttcattcttatttctggcacaaactcccttggccacctacttagcaaccattctcttctagcaaaactttaattttgttgagtaattccccttcccccatgtggatatggacttcacgggggtggcaccaactccagagccaagaagtgagtgatgattggtctaaggctaagccaatcctggttgacctgttccctctaatagtgattggttcaaccatgggcagctgatacagttctgttcaattagtggaaatctataaaggagcttctgggaaaggttgaagaggtacctgggaagaaatagttccttttcttgtcccctggacaggattgtgtctgcagttgagggctggaaccacagcagccaccttgcagccatgcttacaggctgaggagggcaggaaagaaagatagacttgggactttgatgagggcctgggctgattaattcatcagccctagaatccccctagctcaagacttcttatgtgagagaataattttcaacattgtttaaaccaaattgagtttcctgttgatgtttcctgttacctgagatggaagcatctacctaatactctattaattaaagtttggtaagagtctgttttcctggagcaaggcacttatgtacatattacttcttgttacgctcacactagtagagcagaattaatatccctatttgtcttagtctgctgtggctgccataacacatatcatagactgtgtggcttaaacaacagaatttgatttcctcacagttctggaggctggaagtctgagatcaggctgccagcagggtcgggttctggggagggctctcctcctgacttgtagatggccgccttctcactgggacttcacatggcctttccttgttgcatgtgcagagagagagagagaatgaatcttatcctcttcttacaaatcctccaatcctatcagattagtaccccacccttaggacctcatttaaccttaattactttctaaaacccctacctgcaaatgcagtcacattgggggttagggcttcaacatatgaacttgggaagacacaattcagtccatatcacaactgcacacccaagaaaaattaaactcacagatgtgaagtgacttgcccaaatcacatcacttgcaaggggcagagctaggctttgaacagaagtctgcactttaaagtgtgtgctctctgtgctagtcaagcatcccctctggtgtgtgtgtgtgactcaatccataagtcatcttactatcctactctgggaaagataattaatataaaatttttcacattttaaaaaaacagctttaggccaggtgcggtggctcacgcctgtaatcctagcactttgggaggccgaagcaggtgggtcactaggtcaggagatcaagaccattctggctaacatggtgaaaccccatctctactaaaaatacaaaaaattagccaggcgtggtggcgggtgcctgtagtctcagctacttgggaggctgaggcaggagaatggcgtgaacccgggaggcggagcttgcagtgagctgagatcacaccactgcactccagcctcagcgacaggcaagactccgtctcaaaaacacaaaacaacaacgacaaaaaatcagctttaattgaggtataatttaccaacaaaaaagtccaattagaactgtcagattagctgcattttgacaaatgtatgcagttgtgtaaacaccaccacagtcaggatatagaataagccagtcactcccaaaagtcccatcacggaccttttggaatctcctgcatcctgcccttaggcccaggcaaccacccacctgcttcctgtccctgcagtttggtcttttctagaatttcctaccagtggaagcatacagtttgtgtcttttgggtctggctttgttcacttggcatgatgctttggagatttagccatgtggttacacggaccactcgttcatccctttttattgctgtgtagtattctgttatgaggaaatagcagatgtggatttgagttttattttgttttgttttattttatgtatttatgtacgtatgtatttatttatttggagacggagtctcactctatcgcccaggctggggtgcagtggtgcaatctcagctcattgcaacctcggtctcccaggttcaagcgattctcctgcctcagccacctgagtagctgggactacaggcgagtgccaccacgcccagctaatttttgtatttttagtagagaaagagtttcaccacgttggccaggctggtcttgaactcctgacctcgggtgatttgccctcctcggcctcccaaagtgctgggatcacaggcatgagccaccgcgcctggcctctttgaattttaaaatcatactttccatacatgaatgttccgggaagctcaacctcatgtgttctgtggcttgcggggaatcacaccgcaaagacagaaacacccagatggctgggcctgctgagcctgtactgctttccaacagccatcctgggatctttcatctaaatagctctagttccctcatatctccagagagcttgcaccccacccccgaggcgttgcaggaaggaattccatgtgttccccgaatccgagcagcccgtgtctaagcgtcttcacagatgggcagttcttcttttatctagtctcaagctttcatgcttcattactattcttcccgctgctgatgaaatgaagctttgaagtgagggaactgcatggatctgaaggctcgaggaagaggatgacgggaaggcccaggagtctctcccatgtccctggttagacaaaaagctgcctgctccaggagctgatgttgtcacgacccacccacatcccctcgctcgctcttgtcacttcaagcgtgccacccgacttccccctgccagctctctgatttctttgcttagggttctctttgcctggcagggcagttttgcccacccgattcccatcgccttctccccccagggaaggataactctgaggctcacgtctgttcgacactggctcccagcgtttccccagggcttgagccccgttgcccactggggtagctgccgacgacacactctgcctggcttctcctgtgccctgacagtggttcttgacatagtctgcaaataactacctgcaccagaatccttgcctcaggtctgcttctgggaagcccattctgagccaaatggtagcagtgagcactggaggtctctggggccctgggctggctgctttatgcactgctttcatcagtacagtcccctgaggtgggaccgttcactgccatcttgcagatgatgggtaacttgcctgaagtcgagcacttagtgggtggccaagccaggtttcagactcccagcctctcccctacccacctccaccctgaaacaaacatattcaaatgcccgtgtgacccttatctggagtttgagtaaaactcttgggcttgggcgtccaaaactcagaattctgtctctgcctctgtcacagatgtgctgtgtggccttggacaagtcacttcccctatctgggctctatttcccctttataatctggagggactggattgtgtgatgtaaacaggcccctctagctctgacatttggtagaagctaaggttgaaggaggtgattttaggacaaatactaggcctccctatcttatctagcggggagtgaactgcagagttagcacccgcagacagccgggaggaaacgagaaagagccatttgaaggattcagaggaagatgccatggaataacaagggcagctccttgagggatgctgcggggagaggggtgcagacatccaaggttaaaggcaggaggggtcagtctggaacctccttgtcccttgctcctggtgggaagtgacccgggaagaacctggggtagcgggggctcccttcctctgtccagtcccttataaggggtcccttgggcagaggctgttctgaaccttccttcccacgaggactctctcaccaggaggtcacctcccctagcacaggggtggcaggacagggtggagggagagctaatgagccagagccatgttccctccgcctccaaaagcccagagcaaggcagagggaagagccgggtgaattatgcatgtgcctgttaatcacgcactgattaaaataattgtactaatattaattcttccagccctcttggaggagagggcagtgcctgttccctgctcctggcagtagatcatgcccagcagacctgtggatttgtaggatgctggctctctgccagtccctgggcatgccgctggatgtgagctcattgtaccctctgccttgtgaaggagggaaggcccggtgcctggcctggatgtctgaaactgcagaatgaggttcagagatgtcaagggccttaattacagacacacagcaatgagcctggttgggaatcaggcttcctgctccgcgggctgtcggctctgcctgcagggtgaaaacaagaaggattttcaaggcagtgtcacatggttgagctgcttttaggcagataactgcaggaggggacacagagaggcatcctagcttaaagatatctgacttgcaaatgacgagacacctggcttcatttttcagacacctgaaggcattgtggcaaagttaaggaacgatcacaggctctggggccaaacagacttgaattccagtctggtctcccccaggctctagccaagtgatcttgagagcaagacttttcctccttgaaccttaggggtcccatctgcaaaaggagtcagtcaagcccagaactgttgtcgagattaaaggatacaatctaataagtagggcatctcttggcacatagcagataatcctcgggagcagttttccaaggagtaagccttttcacactgatgtgccgttttcactaactggtatttaagagtatctgcgcccctgaccctgtgaccttcttcccaccatggaagactttcctcctcttccttggtgaggtgggaggagttccggggtctccacagagaatttagaatacagagcaattccccaaggaaacaatgttacaagtcattggtaaccacaaatgtaaataaaacgttgtcagctcccttggggattagggggctttgggggctaccctggggctttaaggacaacaggccagctgtgactttagcagtgctattagtagccttgcccactgcttattgagctcctatttgctgggcacttgacatacagcgcttcctataatttttctggatgtatttgaggttggtgagtatttttatttccccctttaacagatgaggacacagagtggtttaattccaggctaaagtttgccatcctcccagtctgtgcttttaaccatgactttattgtatccactgacactgtttatctgggaagatatattgcttgatccaagaagctgacttagaagtgaactttacagacagatccttccataagctaaagattgcatagactctggtggcctagagaatccagagtcagtaataatccaataatgggcactttctgaaggactcagacaacagggcaggtggtccagggtccaaggtttttcctttgccccgaaaagtccatgcagagccctgagcatgtacccagagatggctgagaaggactgtggtcgtgtgtggggatggggtcagtgaggtgtgtgtgtgtgtgtgtgtgtgtgtgtgtgtgtgtgtgtgtgtacatggttcttggtacatatgcataaacctatctatattcatgtgcacataaaacataaacacaggccattatccagtctcaggttctctctgatgatttttttttctgcagttgattattgccttgtcctgtctcttcatctcttatttcttattcacaaacacacttactgatgtggtgtgcatttccttaatttgcatgggtttgcatagtgcctggggaatgatcaaatgtctcatcccctctctccacttgaacaaggaattccccatttagagcaacgaccctgtggaagggggagtgggtgtgtttgggtgattggatcgaggaggtggcacatatatgttaaaaagtcatattcggtatgcccgttgtcttcaaaatatatcctatggcaaacaagcttctcagtgagtggagaagatgatgaatttggatctcctagggggtggatgaagaggcgctgagattggtgagtttatctgaaggggcaggggtgggatgcaaaggtgggcacgatggggcgagtttcttactttttttctagctctcattggccagtgcttaagccatcacatagatttcaatcagctgtaacagatataaccttgaagtgtgaggttgtcaggaaaaagaagaaaggaaggcggggaagtggggagagagagagagaaagagggagcaggctggaaaagagagaaagggagtgtcagacactgtgacaacagcgtcattccctccatcgtgtcctgttgacctgccgcaggccagccccaaaatgcatacagccaggtcttgcccaatcagatattctcgttatccccttaattattctttacaattaagctgtatgttctccatttacagaagaggaagtgaaaccataaagaggtcccttggccaccgaaagggagactcgggtttcagccgaatgtctttcttcctgagttgaaatccctgatccacctcttaccataataaccatgtgatattgaacgagttatctaacttcatgttgcctcagtttctgcatctgtgaagtggggataatactgcagaactattagggttgtataagccttaaatgagttaatgtacataaaatgcatagaacagtgccaggtgcatattaaatcctgtataagtgttagctattattctattgttattattctacgagcatagattgttcagttaaaaatcttgtccctccctctttctcccagtgccccttcctgccagcttctccttccttttaagagttaagccctggggtcggcttctccggccagcaagtgatgtcatccccccttccccttccccctaccccaccccagggtctggcctcccagaggacgggtctgtgcctgttttccagacccccaggcaggcagcagttcggggagcgagcgcagggatgcttattctccgcccttcctctctttgagaatctaagggcataagttagataaccgtgacacctgttttaaattagccttcagaagcctccgacagctgagaaattatttaacagggaaagaattgagttcatgaataaatattaatattaaatcaccacttccctagatttaagaggaagggtgggggactcaccaatagatggaggcagcaggtgtcctggagatgccactgtgcagggctcagagaagccagctgtggggtgggactacggagccaccgaccattggtcacctcgttcctgtccaagccgagaggggactctgtccatcagggaggctggcaggtggcagaggcaacatccaagcagctcacggcaactcaacaggtgctcgtttgagctccaaccttcccaggctgcggtcttagagggagagagactccacctgagagctgcccaaagcatggagcagactcccacccccatccctcagagaggggccactgtcccagcccagcctggccccattgtgactttcatgggtccagcactgttacctccgtgggcccctgcctccatgtaaaaatggtaaaatgtttattttatgaccacattggaataaagatgtattccaaagatgtaatccaggctggatttgtaattctatattcattattattttattcatttttttccctgattttaaaaggaatcaaaatgaaaacatattttgggccctgggcacggtccctactgggcctgatggaggcggcaactctctggctggggtcggggtgacggatgcttgagccagggaagcaggaactggtgaggaggggtcggcttgggggtgagggtctccaggggatggcagagccacccaagggatgtgaggatctggaaactcagatcccatcctttaggtccagatcacagattgaaattaagtaagaatcatcaatttctatgaataacaaaagtaataataatgagtatgaatgaatagcacactctgctttgactgtcctgacccccttggcattcttcaaaagcctccaagcaaaaggaaaagaaactgccaagcacattccaggctcagggccttcgccttagctctcctggcctggcatcctctttcctggtatttgagtgactcgctctcccttcttcttgggtcaccatcctagtgaggttcttcctggcttttggatcgaaatagcccctctactccctttatccactgttcttttcccctccttaattttctccatagcacttcctgcttccttatattccactgcgtgacacatggaaacatagggtataatagaatatacgctgcatgtggcgaggtgtagatgtttaccaggttgtagggactttgtttcattcttctttgtgcacttagcatctagaatagtgcctgccatgcagggtgctcaaaaaaccctgaatgaatgaatgaatgaaacatgtctggcacatacatggcagttacaaccatctttgtgcctagcgctttgggttgctgagccctcagccttcagtgaggaggtattggccttcttccaccattgcagagactgaggcctggacatacaaacaagcatgccccacagtcatacagttaaggtagatcaatagcttccctggataaaacaaagtgtagacaggtccaaggtttgagcaaaaaagtggtttggaaggcgcagttatggaaggatgagggaataagggggctgatgatttcccttcctactccaggttcagcatttcagtttctgtctgcaccagagccttctaggctctttgttggaaactgtggatgtcacactatagctcatacttacttatacagaatttaatatgcacctggcactgttctatgcattttacatatattaactcatttaaggcttatacaaccttgatgagttctgcagtattatccccacttcacagatgcagaaactgaggcaacatgaagttagataactcgtttgatatcacatggtattgtggtaagaggcggatcagggatttgaaatcaagaagaaagacattggagttggggacactggtttaagtgcctgccctgcagaacctaagcagatctgttttcccctgggcctcagtctccccctctgtaaaggagggaactgggccacagtctgtgatccctgcatcgggcagggctgagtgctcccttcttctgcatccaggcttcccaccagggaagggaatgagccctcctccttgctgcctcccctcctcctagtccccggctcagggcctgatgcctgcaggtggtggtggatcctcggtcgtgcggcggatgtgttctggcatcatttaacacctgcctcatatctccgaagccccatcctacacgtagctgtgagcacatagctctgccgaactccaaatagacataagccactgccctgctcggcttcttgtctaattatggctgcgacattgatgtgacagggtgcgtttaattacaggaccatgcacactgacccaaacgctgttttggcccagaattttccagcttgagcagcccaaacgctgtgtgtgatgataataataaggacctttagattgtgctggggattaaatgagataatacatgcttctggcagggagcagggcaccagccagtgacctgtggtcaggtcccagctcctccttccccttcctgctcctgacatggatgcccactctgcctagccatgccctggaaagacacccatcctatcttggctaggcagaatgtcagctctgtcttttttgaatttgtcctccaaggatttgcagaagatgggaacaggggaggccttctgaatatagtgactcttctcccagctcccagaagcacatctggcttggcagcatctttgggccacccaaagccagggtcccttggcccaggcagcatttgggtcagtgtgagggccttcagtaagcacacgttcccatcttgacaccactgccatcactagataagacactgagagggacggcgggctgtgttcattttgtgtctgatgagctctgctataaaatgaggaaagcagttcagagaaattaagcaacttgcccagagttgtccagctaggaatttccagagctgtactcagattcagaactctgggtgactgccctatgccaggcacccccatttgttagcctttaaatgggatctgaaacctttatttatcgggacaagtcctgagtgtccagcagaccaagctttccttcctttccttccaccacaaagtggaaagtcttgccaccacttctgaaaggtgtcttttttttttttttttttttttagacaaggtctcactctgttgcacaggctggagtgcagtggcgtgatctcggctcactacaacctccacttcctaggttcaagtgatgcttccacctcagcctccccagtagctgggattacaggtgcatgccaccacatccggctaatttttttgtatttttagtagagacagggttttgccatgttggtcagactggtcttgaactcctaacctcaggtgatccgctcacctcggcctcccaaagtgctaggattacaggcattagccactgcacccgacccccagaaagtgtcttttgagggtaacttgtttcttcttttcctgaacctgtggcatatgtcacaactcttagcagctgtcccagcactggttcttttccctcctggcagtgaccagagctgtcattaagtgactcattgtgagagcagagactgtctctgtcaccactgttgaatgaatgaatgcatgcatggatgaatgaatgaatgaaacatgaaactctttcctgagttctgtcctttcattgctctagcatgctgccctctgagcacttcccacccctcgaggggggtcatccgtataggggtgggaacagagccaaggtgcctaatggggtccgaagcctctccacctggtgaaattgcctgtagattccatgtctgtgtctgtccacttgacccatgctccaggccccgctgccctcatctctcgttcccctgatgaatcacacgaggcctggtgacacagcatcatcactctccttatccagcagacgcgacatcaccctccttcacccgctgcaaactggctgcccaggcattacaggaagccaccctgccccctcctgggcctggctgccctcgcctctgtaatatcctttttctaatagagtgacctgaaccctatgtgctgttctaaaagcagcctcagaagcccctgagacaggcagccaggtaattcccctggcggaggcacgatcttaccttgccctgcatgtctgaacctgctggctggctgaagaatgtccgttttatagaatataataaaataaaacaggttcattccacaaattttgaggcaccatctagctctgaggtttgggggctcttcctttccattaagttgtaaactgcatgagaactggaccatgtctgtgaatgggtgaattttattttatgtaaattaaacctcaaggtagctggtaacaatgaatgcaagtagataggatatatggcagctgaaataatattccaggaacaatgataaccttgtgcatctggtacccatgaggaggaggtcagaggtgagcctggaaagctggcacaagcccaggtcatggatagccttgagcagcatttgacatcatgagatacgtaacagccatcgctgtgtaacagccagcccaaaactcagtggcttaaatataaccatttattctcctaccacagatttatggtgggtggaggtcagcttgcgtgagttgggctcagctgggccatttaagctgctggtccagctgggcttggctccagatggtgggttgaactgtgtagttcattctgaggtcccagctgagggagcagcagctccctcgggtggcgggtggtgcggggggaagctcttcttgtgaagggggcagaaatgcagaagggagggtcccactgggcaagcctattccaagccattgctcaaccgaacatcccattggctaaagcaagtaacatgacaaaaccccacagtgatgggatgaagaagtaggttctgcccacagagaaggggagaagggagtgggtatttgccgaacaccagttcaagcattcacaaggtaacacaggatagtgtcaagagaataggttctggagtctgggttcacattttgatattcatcagccatgtgacttcaggaaagtaacttcccctctctgtgcctcaatttccccaccaaaaaagcagatatcaaacatagcccattcaatgacataatctccatccagccttctagccttgggcttctcacagagtgagcacttatgtccaccatgatttcaaagatgatgagagatattccaatttcctctttgttatcctttctggttccccgcatcctcctttctttctgctgggccaaaccaccctcccttctccccctccccagggcctccactctcttcaaatatttggaaacgtccctggggtccccagtctcggtcctggttaagccaagctacacagatttcgttcctttaatctttcctcgtaaattaatccctctgaacctttaatcattttcctcgaatgagattcaaatgagacgcttgtctggactcccaccgcacacgggctgcagcctggtgacagcctgtcatgctgacaggtttcttgccctttggggagggtgcaccaagctgccccagagataagaagattgtgggtatcaggaactcataccaacaaaacaacccaagcttttgtgggtatcctgcctctttacctgtgtgtttcctgaagtaggaatgggtggttgatgacgtgcaccctccctcccccagctcctcttgtgacccactggccaccagttatcccttatatggaatgtgtgccctgtctttgtacttggcatgtcaaatcctcacgatctccctgagaggtgagatgagacaatagtaagaccgtgagttcaaatcccagtccagacacttctgagctgtgtgaccttgggcatgtgtaacttaactgttttctcacctggaaaatgggttcataagagtacctgtatcatagagttgttggaagaatacaagggacagcttcaagtagtatttggcacaatagtatttggtcttgatgaatgttggttgttgtaagtcataattactcatgcatggcagatggagagagtcattcagagaggtgaggtgagctgcccaagttatagagatgggattagaacccctctcttaatgtaggtccaacactctggctcagcctggcagaaagggtgcaagggatccccgcatagtgggacaatgagtgggatccacagacctatctagggactaatggaatgtcagatacacgaacagcttgtccttctcttagtctctgggttgtgggtttggaagctggctgcttgtttctattaccttctaggaaatatccttctgactgatcttcaagtggtttccaagtattaaagttaatggttgaggagaaacactggaacaaaacatattccctcccagagttccgccaggcagcaggatccacatgaatttgtaattcctaatggcatcactcaggcattgctcgggcatttaagctgcaggttgtgcagcctatagacagctggggtattgttacactgggcagatctgagttgaatttcttcttcctaattgtgagagcctggtgttaaagatagattttggagtgagacttcctggctcagaatcccagctctgcctcttactctctgaccttaggcaagcaactttacctctccgtgcctcagtttccccatcttggaaaaacagggatgataataatagcacctatgtcatagggttgctgtaaggatgaataaatcaaaatgttgaaagtgcctctgagagtacccagcacaggagagctggtcatgtgtttgttgctactgttgttgccatttcactgtatccctgcagctgggcaagtcattgcccctctctgagcctcagtttctataaaataggtgcactggtccttgtctcccaggagctgggtgagaatctggtgaaataaagtggtggaaagtgcctagccaaatgccaaagcgttatgcattttgagggattattagggggatggcaacataagtgtgagtggcagtgaggtgagtgatgagctgggctatttaaatgagaactttgaagctccccagaagcctgtattccctgtcccccagacacttgctgtgttggaatatctcgtagttttccactttccacctgggagactgatttgctcaaaattggcttggggagggcaaagctcttagggggttgagcacaaagggacagggaaattgtaaatcttgcccccaacagtgagttgctggatgattgggaaatggattgttgaatctcaatctctctgtctcctgctcttcctccctcctctaaagcaattgaagaagaagatggataccatctgtctcaaagccgggcacctggaaatcactcctcatacctccttcttcaccctccgtggctagtcagtcaccaaggcctagaaagatccctccagaatagcacttggagtgacccaatctgtttccctggctggagagcccagtggctctcccctgaatgtctacaatgacatctaactgcatctcttacctcctttcttgtccttttagaatccactctccaagtagcagcttgcagagtatttaaaaaacactcatctgatcgtcccccaattctttgttggcttcccttttttaagaaaaatgttcaaaatcctataaagaaggacctgtttttaccttattttgcagagggggttcagtccaacttcagtggctttgcatatgcctttcctgccccctggaattctcttccctcctctcatgatctccctgccctcacctaacttccctggggtaacttctgctcattcttcaggttcccgttgccttgctcactgatggaggccttcctggctgtgtctgggatctatgctctcatagcatcctctgtctttcttcaacacacttatttttgtaaccatcatccctcctgtgaccatcgttttaacctctcctgggggagtggtaccataaaggcaagctcgggctgctataacaaaatactgtaaactgcgtggcttcaactatagattatttttttttttctcacagttctggggactaggaagtccaagatcagatggcggaagatttggttcttggggagggctctcttcttggcttgcagatggctgcctacacactgtttctgaatatggcagagagagagatacagagagagagagagagagagagaaagagcgagtgagcacactctgatctctctctcttcctcttgtcacaaagacactaatcccatcataagggcctgtattagtccgttttcactctgctgataaagacatactcaagactgggtaatttataaagtaaaagaggtataatagatttgtagttctacgtggctggggaggcctcataatcatggtggaaggtgaaaggtacttcttacatggcgacagcagcaaagaatcagagagccaagcaaaaggagtttccccttataaaaccgtcaaatttcacgagacttaatcactacaatgagaacagtatgggggaaaccactcctgcgatccaattatctcccactgggaccctcccacaacacataggaattatgggagctacaattcaagatgagatttaggtggggacacagccaaaccatatcaggcaccaccctcaagacccatctaaacctaattacctcccagaaatcctacctccaaatactgtcacattagggattagggctagggcttcaacatatgaattttttctgggggggtgggggagacataaacattgagtacgtaacaggcagttatgttcctctctggaccactgattctgagcacagtccttggtagtaagcggacactcagaatgtttgttaaatgaatgaacaaatggataaatgaatgaatgaatgaacaaacaagtgaatacatgaaaaaaattatagtcctgcttgaacattgaatctggaggtcccccctagattttggaggaaccctgtgaatccacgtatgcctcaagaggtctttgtgacaacaggggaggctggataagacactattcagcaaagactctatcttttcttagcagtgacctaactggtagcaaagttgtggcttgctaggatattttgactttttctgaaacaaaaataaattttcgaaaaagaagaagaggaaaaagtcacgtggaactgctccgatctcccagccatgaaatatccctctgggattagatcccctgctgtgaagtattgccccatgattagatctcaagccatgaaatataaccatgaatttagatctcctccttggaaatacagtttgctgattagatcgcccccataaaatatggcctttgggttagtgcatgccagtaaaatatggcctttgattagatcaccgcagggaaggctgaggtgctagctgagactaggaactctcaccacatcctcacaaagtaaaatataaatatatggagaggaagagaaagcagaggaggtaaattaataacggtgacattttggaacttggactttcttgaaggttgtcagcgtgagggaagggatggggacagacctgggcgtgtagactccttcactgggtaacctggtgctggtgacagctggtgtatgaggctccctgtgtacccagaactgtgcagagcacttcatgtgtgttagctcctctagctcccaagaggaaggtgacattattatggtccccatatacacatggaaattgaggcacagagaagcaaagtcagttgatcaaggactcatagccagacgtgtcagagctggatttgaacttggcccctctgccccttgagcctttacccttagccactgccctttggttggcccagccgatgccactcctgacttgcggtgctagggcagtgtggctcccacaaaccctctgctgctgcaggggtgaggagtgaggatccttgtgagagtcagagatgagctggcactgcccctgggctcaccctgggtgaggaacagaacagataatcccagagtcagagcccagggaaaggccagggaggcccttccccacacttaacaggaagctcaggcccagagatgggcagtggcagcaggcccaaggcctcatagcggggtgccagcagatccagaccttgaagccaatgtcgcccgactttggggcaaacatccccttcttgctatgtagttctctctctcgcttgctgaaaggagcagaaaactaaatttggatcatgagtttattcagagagatggcttagtgtcatcacctcccagctcacttagtaatcatgtgagctggacattgtgctgggcaccatggtgcagccgtctccaacctttttggcaccaggaaccagtttcgtggaggatgaatttttccacagaccagggcaggggcgaaggtttcaggataattaaagtacattgcatttcttgtgcactttatttctattattattacattgtaatatataatgtaataattatacaactcaccatgatggagaatcagtgggagccctgagcttgatttcctgcaactagatggccccactgggggtgctgggagacagtgacagatcatcaggcattagattctcataaggagctcacaacctagatccctcactgatgcagttcacagtagggtccgtgctcctatgagaatcgaatgccgctgctgatctgacaggaggtggagctcaggtggtcatgtgaacaatggggagtggctgtaaacatagatgaagcttgcctgccattcgcttactgatgtgtggcccgtttcctaacaggccatgggctggtaccggatttgaacttggttcctctgccctggagcctttacccttagccactgccctttggttggcccaaccaatgccactccaggcttgtggtattagggaagtgtatggctgctgcaggggtgagaagtgggggccggtaccagtccatggcctgggggatggggactcctcccttggtgggccaccctcagccctcttcctggacagagaccctgctcacagctgatccatgtctgggaattgcccttgaaggtcaccgccagacccaaggtgatgctctccagaggtggcccccatctgtgctgctggatgaggacacaaagccctgcctcttccctcaattcagggaaagctggtctcagcttcagagctcccagtggatccacagccagctccctctttgcctggtctccacttttctgcagaagctgtcttgagagtaccgcaatctcctgcacacagctgtctatctcatggtctgtttcctaagcatagttgtccctctgcccctccgattccatctgtgaaatgggaatggaacacctagccagaggtagtctggaggcaagcatgccagtgtgcgtgtgatgtgtgcacaagattcctggcacacactaagtgttcataaatatttgccaaaatccctgccaggtcatctggagctgagaaagtcacagagaagggattcttcacctctattcatctgcaacgtggggccgataagcctgtcttatgggtcattgtaaactctgctgggcagtgctggggacagtgggggtgagtggttcctcctcagacttcatctctggtccctctttctttccctgcagggtgctcagtgaaagccccgggcagaaggctggccacttctttatctcacaggagccagccactggccagctgttatcggggatttgtgagcttgtaaaacatggccagctatcacgccatctccccagggcacagtgctttctcggctgggcctaatcaccgggtgatcttggcctgtgattgaggggagagctgggttaccctgggaaggcagcagccaagtcctctggaaaaggctcgggtgggtggaggagctggggggcatcagggccaggcctgctggggctgacacatcgctggaatggaccatggcagattccatgccccactcttccttcttctcttccctgcagggagatggtagagtgtggggggaccctgcgaggctccagggacccagaaggagataattccagaaaaaacattcagaactgcatcaatgtcagtggccccctcacccattcctcgttaagcacccactcagtgccaggccctctgctaggctatccaaagtgctggactttgctgtgtgacctcaggccagtcacttgccctctctgagcctcaagtgtccaataggaataatagtgcccgtctcaccaggttactatggggatcccttgaggcagtggatatgaaagaattgccttacaaactgtgaagtcctgtgcccataaggatgagatcaaaggataagcctgcatgtggattacacacctagaggaatggctttagagggatgagggacatctcagggggaccagagaaggactcccggagcaggagattatgtgaggctttgctgaagactctgggggaaggaggggttgaaatagagagggcattccaggcaaagggaatgggatccatacggtctgctgggcaggggatacacggggtgtgtatcccctggcgcgggagcacacggcttgagctgtgtggatctgtggcaggcttgcgggttggggaagccgggcccatctggctctgtttttctgctgtcattttggatgcttttgtgctgaattccccttttgtcactgtttccctgcgattttcttttgaacctggcatctgtttggggcttcatccggtccctgccccctgcgttctgaggctcagatctgtttgcaacctgggcatctgctcttagggcagtaggtggttccggctgcctcagcaggtctcagagccagggtccgggatgggtggggcaagggcagatctttgtggaaggcgctggccctgcctgacacaaacatgtgacatctgccctcctgagagtccagtaagaagctttcttcctccctccagccctcctgggccggggagggctgccacgctctgtcatgcacacctgtctcccccaccaggcttcagatggcagaagagcccagccttccccagcactggctttggagccacgcaagcctgggtggactcttggcgctgcatttaccacgtaagcatcctgagctaaacctccagaagcctctgtttcctgcctctgtgaaatggggatcatgctcccactttgtagtaccataaggatgcaacaagatcagtcttgtctaacaccttcttgcctgtggtcagcagactggggcatgaacacggctctgggccgggtctctggagtctgtatcttggttctttcaaggcatattagtgaatctctccctgtgcctcagttttctcatctgcaagatgggaataagacctgcttcatagaattaatggaagtactcgagtctgtatatctgcaacatactttgagggtgcctgaggcacagttagcgccatgtgggtgctcacattgtcatccctactggtgttgtcctgtgacttcactgggacccatagagggtaaggccattgccaggcttgcagctgggcatactggggaccacaaggttcagcatatgcaccgggatcctatggctgagctaagatttgagtctgtgtgctgagggctggagagcagtgcagaggggtgatcagaaggcctgggttggcatcgttcccctgcaatgaattatcttggtggacaatagccagttgcttccatactctgagtttaattttggtttccttctgccagaaaattgggataatctccctcctgaagtctctgtgagaattaaacaagaaaataaacgtgaatatcctttgaaagacataaaatgcagtgggccgattcaattcgtttattcgacacatattaattgaatatctactaagtgggaagtgcagccctggcgctgaggatctggggtgaataaggcaacactggaatcctggtcctcacaggccttcactccaaatgggcagcaggtagcaacccccaagcagagagacaagcacaccaagttcatggggctgagacaaggggaaagagaagtggcccacagggaagggggtgagggctgtgtccaggggcttttgaggaagggcatttgacaccgacagctgagtgaagaaagaacaagcccagacttgtggggccaggggtagtaggcagagggaagagcagcatagaggcccctgtggagaaaagaggcagtgggagagccagtgtggctggagctgtggtcaggggccagtgcttacagggccctgtgggccaaattcagaatctggaatctagtccaagggagacgagaaccatgggaatctgtattagccagggttctctagagggacagaattaatggaatatatatatatatatgaatttattaagcattaactcacacgatcacaaggtcccacaattggctgtctgcaggctgaggagccaggagtgccagtctgagttccaaaacagaggaacttggagtcctatgctcgagggcaggaagcatccagcatgggagaaagatgtaggctgggagtctaggccagtctaaccttttcatgtttttctgcctgttttatatttactggcagctgattagatggtgcccatccagattaagggtgggtctgccttccccagcccactgactgaaatgttaatctcctttggcaacaccctcacagactcacccaggattaatactttgcatcctacaatccaatcaagttgacactcagcattgaccatcacagaggctttggatggggcagggatggacagggtgggtgtttgtctattatatgcttatgtaacatacaaatatggtttagcctacaatggaacaagctgaaggggagtttccccctgagtgtgtgtctgtgtgtgtgctggatgctgccacacttgaggacattcaggaatcagaaaagggttggactagtcagcctcagtaagccctgtgacctggagattctgtggttttatgaagaaatgatcatgtgggctgtttcctaagtccccagagagtgaaagagtgaatgagtgaatttaggataataggaatttaggatgtgactggatgtgagagacgctggagcaaacaggtcagtaggggaagccactggaattcccacttccacaaaacagcagttctctgcttttggtaaagggaagagaaaggagaccctcctactgagttaaaaagggaggagagcgaacatgtttcatgcaggtaccatgtgcaggctctgtgctgaccattttacaaacaatccccctttgacccttattatcttagcttcctagggtgctatgacaaatgatcatagactgggtggcttagaacaacagaaatgtattcctttgaagtttggggactggaaatctgagatcaaggtgtcggcagggccatactctctctgaaggctccagaggaggatcctttctgcctcttccagcttctggtggttgccagaaatcttggtgttctttggtttgtggatgccttgctccaagctctgcctctgtggtcacacagccaacatcttcctgtgtgtctctgtcccttctcttcttattaagaccccagtcatattggctttagggctcaccctcatccagtatgactgcctcttaactaattacaactgcaaagacctatttccaaataaattcacattctgatgttccaggaggacagggatgttgtggggttcactagtcaacccaggagacccactcttttgacggagtgataatgtcaccctctgttctcagactgctaataaagacacacccaagactgggtaatttataaagaaaggaggtttaatgagctcatagtttcacatggccgaggaggcctcacaatcatggtggaagatgaatgaggaccaaagtcatgtcttacatggcagcaggcaaaagaccttgtgcaggggaattcccatttataaaaccatcagctcccttgagacttattcactgccacaagaacagtatgggtggaacagcccccatgattcaatgatctccaccaggccatgcccttgacacatggggattattacaattcaaggtgagatttgggtagggacacagccaaaccgtatcacgcccccacttcacagagcatccagaaagtaaagaaacttacttaaggccacagagctagaaagtagcaaagctggatttgcacccaagagcgtctttgatgagagtcttcactcactctacacagccaagctgtctccaggggatggaatgtcatgccagcctcggaacagcacagggaacttggggtgctctgggtgccatcgatggattataacggctggagcaggcatggagacaggtcagttgaaatgaagttggaatgaggatcagaacaggcttggaggggcagaggaaccccttcttcctcttccttcttctccactttctggaaccttctgaacctagcacagagaccaccatcctctaacaccttcccagattccccggctctgtgtgaatgtgttcccttgctctgagctgcccagccctgttgtctgtgcctctctggaatgaattccattctctttgcacctggcgttctctttggacctcctcaagaccagggcttgctcttttctcctgcattccctgcacctaacacaggcagcggcacacaacagctacactgcggattcactgattccacaggagtttttaaacacaattatgtgttcaaagcagaaaacacagaccggaatgaaatgaaagacagtctggtggggaccaagactcataaacagatgctggtccctagggcagtgcatggcaatagtagagcccagagagaagcctggtccagactatggtatgggagggaggcagagaaggcttcccggaagaggcagcagccagcgcaagtggcaggtgcagagcccttgggcaaaagcgagagctcagccttctggaactgcaagcagcttggtgatgctggggggttgtgtgcagagagacttgggaagggaaaatgttgatggagaggtccacatgaagaggctggggcttcatcctggggtatcccttctcttgagattgacagtagggttgaggaggatttgaagagtttaatcagggggctgaatgtggtcggatctctgtcagatatccagaggctggaggcagggaggccggggaggatgccaccttataatccccgagaaagatgccagcaggctgaatggatttggggttacagggaagggaggagtaatttgggttattactaaatgctcgttgagctggattctgtattgacctgcaggactccatctgacctaatggcagggaggagaggccatgccttggatacttcctgagtccctgcagggcgcgtctgcagaatccaagtgtgcagtgtgcagccaagagctcaacaaccaacatacttagatgtcagcaggagagcccagggtctgtcctcactgccaaagcttagcagggggctccacagggtcctgaaggtaccccctgaaaaattatccgtgtcaaggctgacctttattgagcactgtctagttgacagagtctgttagaagtgctctgttttatctcatcagagccacataatggccccatgaggtggtgctcttcttatatctgtttgatagacgaagaaactgaggctccaagcagggaagtgacttgcccaaggtcacaaccctaggcagtgacggagctgggacttgaacacatgatcttgagcctctcaagcccaggcctctgctgccacctctggaagatgctgttttcccaggaaggtgatatctccagtaagacacccttctatgcaagccacagagacaagtgggggagccgccccgtgcccctgtccagatgagtgaaggaagacggacgagctggcttcctctcttttcccggcttcccggtaccaagtatatattttttctaatcggcccggctgctgatggttatctggcttcgctagagagcgaaagagactttgtgtcaaatgctgaaaaatgacttttcaggcagcctctctgtctcctgaaaggaggtgacgtgctcagagcatacaaatcactcagcattcgggtgtctcgatgcgaggaaggagtgtgtttggattgctaaagccactcctgtcccttcacaaggtcatgggcgggcaacccagtcttgtcagtgcctggagagcagagaagcctggtgctgagaggtgctgtggcccccagatggcaagcctgtggggtgtctggacccaggaggggtcccttggatgcacaaggtacaagagtccaagagggaggctgacctcggattctaggtctccatcagcccacagtaagctgtgtgaccttggataagttacttaacttttctggtccttggaaatctcgctccataattatcatcccacaaatgctgttttcagctaagccattcaccctgctggatgttctaataactgcatttgtctggtgctgacaaatcctcagtgattcccaggcagcagaaacttgcctggtacctacagagaagtcactgggtgtgaaggacaaaggcagacgttggaatgctccagagagggccttgaatccaggctctggaggcagcctgtgggttcaaaccttggctctgccactcaacagctgggtgaccttgggtatgtgactttatctatctgagcctaagtttcctcatctatcaactggggaaataaccaagactacctcatattggggctatggtgaaagccaagggcttagaatgatgcctggaacaagagtaagtcttcagccagtgtcagctcctgtcactgtgactgtgtcttagctgtgctgacgtggccactggcttctataagaatccagtggattcttggaaaggtgtcgtaacctctccaaggcttggtttcttcatctgtgtagaggggatggggatttaaaaattcaatgtgcttaaaatgcttggcacacagcagtttcttaatcacttgtagacatttctctggctctttgcagaaagatattttaaataaaatttcagttttcaagtgtatctgatattttgcaatcctttgaaaatttataaagatgatgtacacagtataatctgtctcgaagtgaacacggggttgactggacaatgccattttctgagtggccataccagagtaagagcccactggagatcagaacttgggggagagtgcccagagccagctccagggagtaggacctgcccaagtcataagtggcagctctgggtcctgcctgcctctcttcctgagatgccatttatagctgccgggacccacatgggcccgtagggtggccctgcccatgcagagaggggagcagctgtcattgtaagaactgagtgagcccaggagccaggctcccagggtgccaagggatcgtcgtcattcatctcccccgtttttattttcttcactataaagcatagaaaaaccacgtagccagaccttaaaaaatacagacggtctccagatgagtctgtgatgttaggcaaggcctgccaggcgctttcttaatgctgtaataaaactggctggggaaaaactctaaaattacggaggaggccggcagtataaaatgtatgggatcaagagagagagagagagcagagtattgcagcagttccacactgggccccaggtggaactgggctgggtcatccgatggcagagtgacgccacttctgtcaccacccccctggccctactttactgctggggtgttttgaggatctaataaggtcgtgggagtaataggctttgttatttacaaataattcgaataaaaggacaataggaagacctctcccctgccccctctgcccagatgcccccccaaagcaagacttcttgatggtggcaggttccatgggccagatgagggtggccccctgggactctctgtctttctcccctgcccatctcactggtcccccttccccagcgggccttggactggggtgctttggtgcccgtaaatgggttgaatgaattaggcccatgtccttctaaagcaaacttttaaaaaatactcagttttgcaaggccccccggtacattaaacagatagaagggagggtggctctggtgaataaagagtgggttggggcccctgcacccatcagtggcgtgccctgagttcaaatactgtccctgccactcaccacccaggggatgtgtttcagtgtttcgacctctcccagcctctatcgcatcatctgtaaaatgaggatagtgctagaactcacctctcatggtggagattcagtaagacaaaagatgcacctggctcagagtaaactcctcagatatccccattacaacaacggctactgtgatttgactgctgttggatacacggacatccaggcgcccctcggatcctgggcaccggctcttgaagtgccctcacagaggccctgtcaatccaggcatccgactccacagttctcagcttcccagccctggtgactccactgcctcctctttggccatctgcatgtgcgtgatgggaagctgtgcctgtgcctctcctcggtggctgcggtaatagagcccagagtgagcaggtggcagcccccctcccccttccctggtctccctccctccctatctctcacctcggctgcaaagctccgactttatttaatcgcttccattgtctgctccacgcctggtaatctcagctgggaacacatgttaacaaatgggcaaagttttatcgggagctcagagcccctccccgcttcgtcagataaggtgctcttgcttgggggctcacactagggaagctgctcccggcccccccctacccccgtgagaatccatccctaggcaattgcattgtgtgagcagggtaacaggagggatgggtaggagcgggtccaagggggctctggggatccagacaaagaccccaagcccctgctccttccccactcatgggttctgctgcttctcctgctggctggaagacccttgagattctgcccattgtgggacagtgggaaggcttgccttagttcttggttcacatccgggctcttgcgtcttcccaactgcatgatggtcacttccattctctgcatcttggtcacctcggttataaaataagaaacaagcctatctgtctcctgacaaagagagtttaagtgaggttatgtgagtgaaattatctagggaaatgcctggggcttagtaggtagacagcgcccccctttgcttcctacctgaattagtttcctaggactgctgtaacagtgacttaaaacagcagaagttattgtttcacacttctggaggctagaagtccaagatcgaggtgtgggtgggccacactccctctgattcctgcagggaataatccatcctggtgccttcctagctgctggtggctgctgcaattcttggtgtttggtgttcctgggcttgtgcctgcatccctccggtctctgcctctgccatcacgtggcctgctccctctgtgtctgcttctgtgtccaaattccgctcttcttataagaacattatattcaattcgggcccttcttcatcttaacttgattatgtctgcaaagaccctatttccaaatgaggccacagttacaggtgtagggcttaggatttcaatgtatcttttagagggatatagctcaccctacaatgctaccttttggctaagtcttcctaacttgagtggccgggatccacgttgcccttggatcagcctctgtcactgagctgaccctgctttgagtttcacgtgatttatgtcgttgattttaccccagccccatgaggagggataatgaggaggggtccacctttgctcttctgctgcgctatcctgttctgtgctagggatggatgtaaacagataatagtgtttacatgagacaggggccacactagggagataagcatttatggaagcaaagatagtgtccctttctcactaagtggaagtgaaaataggaaggctctcgagagacccactgagctggtcctggaagggtaaagaaggcattctgggtagaggaaggagcttgagctggggactggaggaaggagcgcccctgagctgtctcagcatgggtgagcagccctgggagactgagtcagggactgagcgcgtgctcagggaaggatggagctccctggaggtcaggctttaagggcagccgggctgacactcagaatggccaggctaagaagtgcagacttgattgtgccagcactggggagccagtgaagattgtggaactgagacatggtaggagcagaatcgtggctccaagggctaatccagcagcaaacacatttcaaagtttttgctgaaggaaagcctcaccacggagggacacaacgagcactggaatttcaaggagctgtggaagtctatcatccagaaattccccagaggaacctctagcctggctggatggacagcacccatgtcaactcagcctcctggtcctgattcctccttcacgctggtgagggacaccaggcatggccccaggatatctgggagctgggacccacctgctctcccttctaagggaaatagcaaggaacaggtatctctggactttgcctcctctgccctctcattggggtgtgtgtcggggggtctgtccgttactggcatccctctcccatcccatgccgaagattttgacctttatagccaagtctgagctgtactgatagaacatccacaaagtcaacagtgggaaggttccacaggcccaagcatcccttcctgtgccttacaagtggaatcatttatttctgtcctctaatcttgattaaacccatctgaaaataagttagatatcaaatctgtgatttcagtcctccctccgttcctgaccctcttctccctctagttgccccaaaagtggccagttttgttcaggagagcaccaagcacttggaaaattccattcccagccttcccagctcatttctgcttccacgcaccctgctgcctcctgacagtctcacttttaactctatttacattctggaaagtacataagatttttatcatgtactttcctaatgtcaattttcccctgatgagaataaggctgtaaacacccatattttcataagcctgttatagtcctccatgtattcaaagtcgatgagcaatgcaatctcacattctcagggctggctgggactggcacaggaggacggctcaaggcaaactctgggagccaaactcctaggtgtcttctttgtctttccttgggttaccaccttcattacttttgggggcccttcttttatgcctaaatctgggtgttccttctttttcacactgctataaagaaatactcaagactaggtaacttatacagggaagaagtttaattgactcacagttcctcatggctgaggaggcctcagaaaacttacaatcatggcagaaggccaaggagaagcaagcaccttcttcacagggtggcaggagaaagagagagagagagagagagagccaagggggaagagctatttgtgaaaccatcagatctcatgagaactcactcactatcatgagaacagtatgggggaaaccggccccataatcccatcacctcccaccaggtccttcccttgatacgtggggattacaggttgagatgagacttgggtggggacacaaagccaaaccatatcaatcagtatatctatttttggttggaaccatcaaaacctgctagactactcttaagctgtgggaatggacaaacaccaaaaatggcatccagagaaggcacagactatgcatcccctaaaccttgttatcccagggaaaggtgccatgggcctggtccattagacccatcccagtcttggctttgggtgagggacaccattcgtgacactctacacacttctaaggaagttgggagtggccaggctgcatcaggctagctgggtaacactgggatttgcaagcccctgagcctctgggtggttgagtgggctttctctagaggacatcacaactcagttactgagacgttttcttatcaatctagttttactgaaacctcatggtccttcctgctgagcccacttgttgcaaggctaggtggggaaaggctccagggatgctgcaacaagcaggtctttgcctcctcaagtctagggacatgactggctccacctctggcccttgataactaattgtttttgttttgttttgttttgtgttgtttgagaccgagtctccctctgtcgccaaggctggagtgcagtggcgcgatcttggctcactgtagccaccgccatccaggttcaagcgattcttgtgcctcagcctcctcagtagctgagactacaggtgcatgccgccacacctggctaggttttgtatttttagtagagacagggtttcaccatgttggccaggttggccttgaactcttgacctcaagtgatctgcccgcctcagcttcccaaagtgctgggattacaggcgtgagccaccgtgaccagccccttgataactaattgttaatgaatgaatgaatgactgtttgtatatccttgaatctgaagtcacttcattcaccagaatgagagcagcagagtctgctatgaaggggaacaggtggggtgggggcgagggtggtcagaatcctgcctccagtattagttctttctaagcctggggtcagcacattttcctgtaaagagctagatggtaaacattttaggctttgtagtccacagggcaaaatcgaaactgttatgtgggtatttgtatatcatttaaaatgtaactatttataaatatgcaaatcattcttagctggtgggtcctacagaaacaggctggccaagatttgatctggggccatcgcttgccgagagctgttctaagccttgtttcctttatctgtaagatgtgaccaacctctgtttctgagggtggttgtgggtattccatacaccagacagaatgtgcctggcagcgcttagcacatggtaacaccataatcctaaaagccctatgggatggagggcttactcccaggcactcctctgagaatatgaactcataagctcctctgaccccataacataggtactgttcggtctccattttacagatgaagaaactgagccttagaacgatgcagtcatttgcccaaagttacatgttggttaaatggcagagctgggatttgaacacagggactcagacttcagagcctgtgctcgcaacttcagtgatcagcagctgcagtagtcattgttgctgctgttaattatccttctcagggatccaaaggaatctaaaacgagccaggacaggaacactgccagaaaatggatgatacaaaaatcttccttctttgagtgtggcgtgcgctgcttggttttatttggccaccagttcacctcttgggttaccatggcttgaatctgttggtttgacgtctctgaatgtgtgctcagaggtggaggggagatgaaggggagaggggctagagaaggctaggtcaagtaggagggccatccagtttacaaacacacaaggcagtgtgtgtctgatctcccttggagcatgacagctggcttctctcagtcctggaaagagagatttaggttgggcaggagcaggaactagagaaacatcctgagaatggatcacattcaattcatgacctggttttagcccagaggcagggggatgactgagttgacctttcagggctacatcctgtcttcctgttgggcttgggagtttatgacttgcagagaaaaactactccataggtacaaataccttccttacagttcaggtgttcaaaactcccttttcgttttttgtttaaaataaactgatgttggacacacagcctctgagaggatttccaaaaactcctggaaaagttttagatcgttatcatgtaggacagagagggattacatttacatgtcaaaagatgcaaaggccacagagtcctgctaaaaagttgatggggagagagaggaatgggggagagaagaaagataagaaggggagagagagagagagagagaaagagagagggagaggagagaggaggagagagagaattctgcaatattaaccatggctttctctgtgtagtggtttatgggagaagatttttgtttttttatgattacctgggttattttttattttctacaataaacatatatgattcttgaaatcaccagagagagatgtcattaaagattaaaatattgataagagtgggtctgtgcctcttcttccagagccaggtaggagtaggaagctacctttccagcgagaaaaatcatcctgtttgtacaggacacgtttgtcatccggtgtttccttgactccctcttatcttgctgacaaggagaaggatggaaaagggactgtgatcgagtgaggcccacggagcatgactcaaacaacccattgtgaaggagggtaatcgcagaatcagctttggaaatcaaataaaatgccatgtcttgtagccaagagacactgcccaagcgtttgattttaagctcagctgaaaccctggagtctgtcttgaactgggaggaggactgactcaaggtgggactaaggtgatctatatgaagaattctaataaaaatgtagattggaatcagacttaggagaaattgtgaatgataactgtcagggattcgtgagaaagattcaaaattctacctacggggttcttttaaatgcttgccctgtatgatgatctcttttaatgctatgttacagaatggttgggttgatgtgtcattttcaagaagcagtagaaagcacttaacactatgcctacctcatcataggccttataaaatgtcaacaattcctggatactgtttcttctgctggacacactacagtgaacaaaatagacaaaacccatcccctcatggggctgacattctagtcaaggggtagataaattttaaatatggtgtcaggcaaagatgtagtgctgtaacaaataaagcaattttcaggatagagagagaggttagctgggaattttagagcatttgagactgggtagtcaaggcttctgtgggttatgacattgaacagagaccagagcaaagtgaacgagcaagccatgtgcacagctggctcaaatgtgttctggggctgggtgccgtggctcatgcctgcaatcccagcactttgggaggctaaggtgggagtattgcttgagcccagtagttcatgactagcctgggcaacataatgacaccctcatctctacaagcaataaaaaattaattgggtgtggtggtgcatgcctgtaatcccagctactggggaggctgaggtgggaggattgcttgagcccacgagttcaaggctgcggcgagccatgatcgcaccactgcattctggcctaggtaatagagtgagaccccgtctcaaaaaaaaaaaaaaaaagagtgttctaggaagatggaacagtaagtgcaaagaccttggtgtgggaatgagcttgggatgtttaggaatgagcaaagagtccaatgtagctggagcagagtgggcctgagaaagtggtagaagtgaggctggagtgagagctgggtgcctcaccgcacaggcttctgggccatggagaggactttggctctgactgttcagtatgatgggagctacctaaaggcttggcacaaaggagcagcatgatctgcttgatgcttcagaggactgctgctatctcagataaacatgatgtattggtctgctattgctgtgtaacaaattactacacacttagcagtttacaacaccacctgtctattttctcacagttctgtagcttagaagtctgagtaggctacactcaggtctctactctggggctcacaaggtcaaaatcaaggcattagctgactgggctcttatctggagtcttaggagcaagaatccacttccaaacccatttaagttgttgcagaattcaattccttgtgggtgtaggactgaggtcccggcttccttgctgattgtcactctcttctcctgtagactgcctgcatttttcttcaaagacaatgagggcatgttgaatccatcttggactttgaatctctttggcctcctctcccatccctagagggagaaaacttcccacttttaagggctcatgtgatgagaggaggcccactgggataatctccctatcttaaggtcaagggtgtcatgtaacattacatgatcatggagtgataacccatcatattcataggttctggtgattaggatgcagaaccttagggaaggggatcgtttttagaattctgcccacctcatgtgaggcatggtttagctctccttgcaggaaaggcatctgggtatgtggaagactctctaatatggaccatgaaatccagggttacaaagtcaggactacaataccagtccttattgcactccctcaaagagcatttattaagcacttctgcattcctaaaagtgttttgcatgatgaaggatttaaaacaacagcagacaattgcatatcactggggagctgaaactaatgatgcagaaagcaagtactggatttggtaaaatgcaagggagctcagtgctaaaggatgcaaaggcaggaagaatctggcaggggctgggattccctgttgacacctctcccaccagaccagtccatgttctggtctggtgcctggctcagaaactagcaggtgtttcataaatatttgtccagccagtgcatgaatcaatgtgcttcagttttcataccagtaaataggagtattggcctccccacatgtttgtgggaagatcagatacagaagggctgtacacttggaagaaaaaaaacgggttcaaaagtcagtgtcattatttttgtgagtggcaggaattcgctttgacatgcccctgggagagagataggaattaacaaccacatcaaatgcatatcattggccaacaggggagttttcctaagggaagatttatcggaaaaagtttgggttggtggaaggaatagcacagatgcctgagggcccctgggaggaagggaaggggcccagaggcctggtgggcatgctgaaagcaaccttcaccttcttcataacccacctgatctccttgcccagagcagaattcagttcccctgggaaggaatgtgctgggaagcaatttttccttcccctgggaaggaaggaaaatgctgtccaaaggtttcgggttttgggcagttctccttcagtttaggaataatatatatatatatatatattttttgagacggagtcttgctgtctcccaggctggagtgcagtggcgcaatctcggctcactgcaagttccgcctcccgggttcacgccattctcctgcctcagcctcccgagcagctgggactacaggagcccaccatcaagcccagctaattttttttttttttttttttttgtatttttagtagagaccgggtttctccatgttagccaggatggtcttgatctcctgacctcgttatccgcccgcctcggcctcccaaagttctgggattacaggcatgagccaccgtgcccggcccagtctaggaataatatcttaataccaataacagacttttctcataatagccccaaactgaatgtccttcaatagtacatggaaggaataagtggattgcaatatttcacacaatgagatactaaccaggacacatttttttgaaagcacaaactcctgataaatgcaacacatagaggaatgtcagaaacatcatgctgagaacgtgtagccagatgcaaaggggcacatactgcaggattccaggtatgtgggctcaagaaaaagcaaagctaatctatatggagaagccagcatagaagttatcgtgggggtgaaggtagtgactggggaggaaggagaaggtgggaactttctgggtttctgggaatggttgagtggtgtctacatgagtgtgcacataagtaaaaatgcatcgagttgctcgcttgagcatttgtgcatttaactataaattatacctacaaaaaggaataaaatcattacaatagtggtagcatcaaccacattttgagtgctacattagcactatacagctattatctccaaccttgggagataggcattatgattcctgcttaatagataaaaagactgaagcttcctgtgtccaagagcatagttaggaagtaacataacaagattcctggctgctttcttggcctgtctcaatgcctttcctatcaggaaggccaggtgacctgggcccagggcctacccaatacctgcatacagagggcccgccttcttttcttttctttctttctttttttttttagacagagtctcactctgtcgcccaggctggagggcaatggggtgaccttggctcactgcaacctctgcctgctgggttcatgcgattctcctgcctcagcctccctagtagctgggaatacaggcgcccgccaccacacctggctaattttttttttttttttttttagtagagacagggtttcactatgttgggcagactggtctcaaactcctaaccttgtgatttgcccaccttggcctcgtaaagtgctgagattacaggcgtgagccaccgcacccggccaggcctgctttcttttctaaatggtactggacagttggtggagtgtgccctgccctggtcctgtcatttcttgtccctggagacaaacctgccccagacacggtccatgcatccgttgccttgaggccccaggcctttctgtcttcatgtagaatctggcagcctgcagattgggaataaatgatcttctgttcaccccaccccggcccacttgctcctcacccaacccctccattcaatgagacgtctacagtctgcacctgggccttcagcaggacgaagttagatggtgtgtgaatcaggtacaaatagccttcgggtgacatccaggcactctataaccatgcaactgtaataggctgatgtttctcttgctggatgtaggatgtatgcatttaatgaagtattaatatgaagaccggattgcttctcctgtcaagtggaagaacgagattagagaggagagagaagctgggtgctcccctgggaagagggatcccccccagacactctcctttgtgagccaggactcctttgctttgcagaataaatgcatcctaacagagtgactgtaaagggactttctcataggatttttgcattgcaaaatcaaaatatgttccagagagcaggaaagatgctcccatggagtgagtggatctagtttagtggcaaagaagtttggctgaatgtcaggtgttaggcatagctagtgtggggtaacgtttggggagaagttttccagtaatccatacttccagctttcgacggccggtcctggtgttggagactctctctgctgtgctagggaactcctgagtccacgtgcatacccccctgaagtttgttttcttacctttattgcagggtgtctcagcctcagaacttcttgtgcttggagccagatgactcttggttgtggggctgtccccgcactgcagggtgtttagcagcatcaccggttcctgcacaccagatgccagtagcgcagcccccctccagttgtgatagcagaaaatgtcttcagacattgccaagtgtcccctgggggtcaaaaatcacccctggttgagaaccactctgctttcttgaaccatctctttattttattttattttattttttggagacagagtctcactctgtcactcaggctggagtgcagtggcgtgatctaggctcactgcagcctccacctcctatgtccaagtggtcctcccacctcagcctcctgactagctagctaggtttacaagtgtgcaccaacacacccagctaatttttgtgtttttagtagagatggggtttcaccatattagccaggctggtcttgaacttctgtcctcaagtgatccgccctccttggcctcccaaagtgctgggattacaggcatgagccactgtgcctggccttccctggaccatttctaacggctgctagagtggagatgtgaaatctccctgggccagtcgggctgttgccctgataactaagctgcccagcttgaagagtctgaactcaagagctttgatcctgcaagaagagtccattcccttgttcttcagtgggaaaaccctgtcacctgagttcatttaaaactgatgcaaatccagagagcaaagccacgctgcattcagaacatgtcttaagacaataggttcaaggaaacagcgttgttactgagcaaattccctttgcaaatttccaggcccttccgtgccaaagcaaggtaatccagtttaatgcgagttgcctttttgggagagaaaaataaaaggcaaaatatttaaggattcctttattctgcttttagcttctgagcccagcaattaattcgtatgtgctaaaggacttctgtgtttatgaggcattattatttaatgtaggcctattttaaattgtaatttttttcattaagttgcctcttttcacttattaagaccagttttataacctagcatagactgtattccttgagtaataactatttttcttttaaaatattccttaataacccatcatccatattttaaattttattctgagtcagagatgcctccctgttgctcacacgtctctcctcatgattctgagtaatgttggaggatacagggctgccagatcctctgccagctttgctttaagtctcagtgcagaaagcgaaacagcagccactggtgactgcccagcctccacgctcctgaggcccatgtggagcagccaacaggttgggccatctgcctcacagcttcccagcaatgttccataaggcaggcttgctgggagcagctgatgggggtggaggggcgcagagaagtgggatagctgcagggagctggagcatggcagggcagtgaatcccaggtcatctgcggcagcacggcccccgggtgccgggcacagtgctatggtccttgcctgggccatctctctgcatctccccttgccagccttaagaagtaaagagaattatcccattttgcagaagtggaaactgaagctcagaacagtggcgtgacttattcagggttgcaaggctagcttgtgatagagtcagaagctgtccccaggtctgtctgattcccaagctcaaagttataatctctcagcactagtggtcctgacaattctcctacaagcaatgagaccaacttctccaatagaacatttcagaacaccttccctgctgttctcatcttggcatcaccattgtcctgagaaataagcgccatgagcccatttttccgatgagatagatgactgaggcccagagaggagtagggacttgccctttgtgtccatggcagaatgagggctagcccggggtcttctgcttcaaggtctgggctgctttcttttcttcctgcctcagcctgtggtttccctattgctgactgcaccaccagcccaacccagggggggtcctggcccctctgctcaacatgcccctggccctggagagggcactgcaaagacagccatgggctgtcagggcacctcacaagcatcctgtggtcacattggtctcagccctcctccctgtcagcagtttcagctgttccttggatgcaggattgacccagggttaagaaaatgggaattcccctcacccaccaccaaggacatggagaaagttccagagggtgaccacaggctgtcagatgaaagacggtcagggaaaagacactagtatggtagaaaggtcataggactgtgctttaggagacaggggtcctggtcttgagttgcctgttaattggctctgtggccttggcccggggctttctcttccctgggccttgatttatccatctgtgtaacaaaagggtttcaattccagatccttaagtcccctccctctgatatcctgccatgggaaacctcctttgggatgccaattcagcaacagtatggccagacccactgatttattttgttgctttttcattcatcttattcattcattcactttttttccaccaagaacgttattgaattcccactgtatgcaatgcattagtggaatgtaatagtagactaactgctgtaacaaaccaaatttcagcagcttaacacagtggtattttatatcttattcatatcagggcttttggggaccataggaggacttggctccatacagtcattcaagtacccaggtttctttcatcctttcatcttatgatccaccctctgccaagtcctcagagccctccccaccctggtgatgaatggagagagagggtgtgcaggcagcatgggaggtttctaggggccaagcaggaaagtcatattcccctggccaggatatagtcacatggccctgccaaactgcaagtactgcctgagtagctaggagggaaaggaaatggagtgtggggagcacacggccatcttcctgggtctgggcaacacacacacagcacagagcaaggaccatgtacaagacagaagcttcagatcccaatttgagctcgggtgaaggagtctgggacaaacacaagaacgtgaggtcccaggtggacccggaattggcaggcccagcattgcatcccacaggaatccctctcatcagcccaggatctgctgcctaaggaagcttttccctagtctcatcaccttccctgcccaacacttcaaaggcctgaggactgactgagcaagtcctgcccttctctggcctcattgtcacccatccataaaatgggaagaaaaatgaccaacattagctttgcagggaattggaggagcatcaggtgtctacaaagggccatagaacagccttcccaagtcttattaatagtataagcatatcattatcaataatgaaacacatattaataataaataaacaaactaatgataaataatacatacatcatgaataatacattaatcctacaagtttttgaacatctattgcctctgacagaggggaatttgattagtttgctggagattagagagggggaatatttcaaaagagcccgggaggtcggggcaggggatggatgccagaaagcaccggggactgctccctgcaaaggctgtaaatcatttgaggtccctggtggcccagagctgagctgacctgttaggggaggtgagaaccaggaatcttgagtgagatgctccccctctgatgttctttcatggcccaaatttaggatgggaaatctatagctcaataaggcaaaaagtatccagccgcagcaaaagtagagttcatggtccaggctgggccagttgaacatacctattatattagtctgttttcacactgctataaagaactacatgaaactgggtaatttataaagaaaagaggtttaattgactcacagttctgcatggttggggaggccttgggaaacttacagtcatggaggaaggtgaaggggaagcaacgtatatcttacatgcaggcaggagagagagaaagcgggagagaaagttccacaattttttgtttttgttttggtttctgttttttgagacggagtcttgctctgtcgccaggctggccaggctggagtacagtggcgtgatctcagcttactgcaactttgcctcccgggttcaagcaattctcctgcctagcctcccaagtagctgggactacaggtgcacgccaccacaccaagctaatttttgtatttttagtagagacggggtttcaccatgttgggcaggatggtcttgatctcttgacctcgtgatccgccctcctcggcctcccaaagtgccaagattacaggcgtgagccactgcgcctggccagtaccacacttttaaaccatcagatctcatgagatctcactcactcacaagaacagcatgggagaaatctgcccccgtgatccagtcacctcccaccagatccctcccctgacacgtggggattacaattcaggatgagatttgggtggggacacagagcgaaaccatatcacctgtagaacttattagttcattcatggattcattcatagattcatggattcattcattcattcaatgtgtcctcaatgccagtagtgtggccagcaacacgcaaagcactaagaatgtagtaacagagacaggcatttggcccgttagaggctcccagtctgctgtgggaaacagactggcaaaaagaagtgtcctcatgcaatgagttagggctatggtagatgctgtgagagggccacctaacccagatttgggaatgctgggcatggggtaggtgaagctggagtgtacatcaggagtggtctttggggtaaatgacatctaagctaagacctgaaggacatagcgaagtgatgggggcaaagtgacggtcttccaggccaaaggaacggcaggtgcatagacccagtggcccgatgcagcctgacatacttggggagctctaagtaagtcaggatggctgtggctcagggtgcaaaagatagaagggcaagagatgagcagagcaggaggaagacccatgagtggttttgtataggggtcaggggtttggacttcatcccaaaggcaacagggagacaaagaagaatttggatgcaggccaggacatgagcaacctgggctacagcataatccacattgttccagggctccatggctcacaaatccccgtaaggtacagtgttcatgtcttggttcattcattactttatttgtgcagcacactcactgagcacccatcctgtgtcaagcattatgcagaggtgcataccgggtccctgggcttgagcgctagtctgatgtctgagacagacacacgaagaaccacatgttatattacaatggaatgtgtttgggctgtgactgagatgtttacaaaggtctatgagctcaggagagggtgtatcagactcatatcagtcaaggagggggtgaccatcacattgaacctggaaggatgcaaattaccctaggtgaactcagaggagaagggtgttccaggaagaggaaacagcacagggaaaaataattggaggggtttggaagggctgatgagggtgctgcaaggtgggcaaaggcacaatgtgagactgattgagttggaggggcaaagagaggcaagctcataagggactcagttggccatgacagtctgaactttatcctgaattggaaggcaatggggcagggaaattgaatggcattaaccagagaggtggcatcatcatatttgcattttagaaatatcattgagattttagggggctgggtaccttagagggacaagtttgggggccagagaccagtgagctggctattgcagagttccaccaggagatgtggagggtccaaactgaggccagattggtgcagagtggagtgaaaaagacagttgtgagagttattggagaagcagaattgatccgtcttagagactgatgacctgttagctttccccctctttatggagtggctttcttttcttaaaggcactgcccactcctggccccacctctcacccttttttcggccaacaaggaggtagatggttgggagtgcccattagtccagcatggaagagtgtatttcacagaactctctgtacctgcctagaagatatggttgcagtaattggtttgttgtaataatatttattacaatagtaattatgtagcactggaacccagggaggatgtccttagtgccaagatagggtatttgtcttcatgagataggggtgacctcttttcttcatgagtggtagtgcgtggagctcctgttatcacatggagataaattccagacccacagcagggggagggtggtgcgaggaatttatgtggccctgactgtcatggtccatcccagcaagacctaaaatccagctagtggagctgctgccaaccacctgaccacccgtctgccccaggtcaagttgtggtgtgatccacaatggttctcttaggagataagggtccttgaattcttgtcaccactgctgcacttccagatgcagagtgggctgagaacctgtccctgctctcaggaactcctagtccaatggcagacatacccgctgccccctgaggaaaggatggatgacccatgttgcttttcagtcttcactaattacttgctatcaataagtaatggtttgggtgatacacggcagacacttctgggccaaaataactggtcctgagctaggttcagaggactgtgtgtcagagatgtggcggaacaaattggccagcccagccacaagtctcttacagttccagagacgttctcagtcaaacacaacttcctggccctccttgcagactttgctggctttgaacttgaaaatggcctcagccatctgtcttcctgctgccaccttgtggatgcattgtgtcctgtgactatagcagggtgcttgaccctgctacactccagcaagacttcttgtgtccttcctagcccgtagtcccactacccactacccactcctgttttcagcttctccatttagaagcaagggggagtgggttgccatgaggtggtgggaagagtgttggactcagagtcaaagggcctgcctgccaagcctggttctctgtgatggtgagaaagtcactctgcatctatgagcctcagtctcctcacctgtagaatggggacactatccgacagggttgcaatggtaatcaatgagctagtaattacagaaatcctttgaaaactgccaagcactggtcacatgttcattttttcattccttcaacaattatttattgggctcctactaagtgccaggcactgttctagattctagggatatagtagtgttagtccattcttgcattgctataaaggactgcctgagcctgggtaatttataaagaaaagaggtttaattgactcaaagttctgcaggctgtacaggaagcatggctgggaggccttgggaaacttacaatcatagcagaaggtgaaggggaagcaggcacatcttacatggctggagcaggagaaagtgggggagctgctacacacttttaaacaagcagatctcttgaaaactcactcattatcaagagagcagcaagggaaaagtctgcctccattgcccagtcacctcccaccaggtccgtcttccaacactgggtattacgattcgacatgagatttgggtggagaccacagagccaaatcatatcaaagtagtaattaaacaacacaaaatcaaggacttccagctctggtgagatgaagtgaagacaagcctcatttcatctttcactaattcaaatataaaacctaggcagaatatatggacatctatttgaaaaatctgaaaagtaaatactagcagatggattggggaaaacactagaatcaaggtgccacataaagaatgaagataaataaaacctacagtcttactgggtaatacttaaaaagtgcagaatacaaatgaaaatcacttgatacacacacacaaaaaacccatgaaaatctcaactcacatggggaaagaaaatcagtagactacaatgatgagatggcacagatggttgaagtatctgacagagattttgaggcagctatgaaaatgcttgaacaagttatcaaaaacagtcttgaaacaaataatgaaatagaaaggctcagcaaagacatagaagatataaagaagagccagttgaaaaagtagagctgaaaaatacaataaccaaaataaaaaactcactgactagactcagtagcagaatagagatgacagaggaaagaatcagtgaacttggaggtagatcaatagaaattatccactctgaataacagagaaaaaagtattgaaactcacacacacagtctcatggggtgtacagtctagttggaggtcagggatgtcaacagacaataaacaagtaagtatatgtaggcagtgataaacgtctaagaaggagtaaagcagggtaataagtcagagagtgacaggggtgctatttacatggggtagtcgcaagagtcttctccaaagtggtgacatttgagcagagaaaggattgagggattgagccatgtgggtatctagggaaagattgttctggaaggtgggagcagcaagggcaaaggccctgaggtgaggatattcttaggaagctcaggggccagcagcgttcattgtgagtagagaaactgaatgaattcagagtgaggggagctgaaatcagagaggtagggaggacacagggccaggtgaaggcagaacaggtgggccagtgaggagatggagcagtaggtgaggaaacaaatgatggtggccaggtgcagagagatagcagcggaggggtgagctagttggattctgcatatattttatagagcttacaggccttgctggctgctttgatgtgagcatgagaaaaagaggaggttccaagaagtagattggtgtgctctgagctccctgattggcaaataggggaaacatcacatcattgtagggcctgtttccttgtggtgcctggagacaaccaagaggtgcatcaggcagtgatggactgccttacagcagggttccctacccaggacttaggcacgggcatggaggatgtttgcatttctaagtgtgaagtttcctggctaatctgagtccatgcatctgggcttgtgagatagcatgaagaaccacaccctcatctgctgcaagctcctttgttagctcccctcatggcaaggaaatgggagaagccaggaagataggacaaaagctcagctcactgtgaccaggagaagcaggatattgttcaggatgcagcagcagctcctcttgcagccctgagtctgctggttctggcactcacctgctgaggtgggcaccaagtttcttgctcgagggccttgttgttatggtggttcagttaagtgccactacctgtagatttgtctgccttacagtctctcccttaccaccgtgctgtctgctgacgcatggttaacgtctcatatcctaccatcctgagtgagagaacctgatagggtggccactcaccactcagtgctgatttcctctgttggatgcagttctgatgcttggtttcatgggaggctgttggatactccaagctggcagcagcaccaatccaagcagatgtggtcagagaagcaggttcagaacacacctgaggtcgggggagactttggctcaggctgcttagggaaaagcccattagaaacaggtgcctctgtgagggccctcctgggaattataaaacagtcaagggaatgagtagaatccatttgtttctttcttcaacaccatctttgatccaggtgctgttctaggcacctggggaccatagcaaatagaaacagttcatggcctgtgttgaggtgagcataccctgaatatgtcattacaagtaattttcggtgtcccaagcagtaggagcaggagaggcaggagtgctttgaggactatggaagtttgaggagttgttttcttgaggaggtaacatttttgtgaatccttgaaggatgcccaggaaatatccaagttacccaagtgagggagagggcttagggcagagggacagcctgtgttcaggcccagaggttagaggaggctgtgtgtgcaggagagcagaggcagcaggccctggatgatgagtgagaggtgccagaggaacctgagagctaggcatgggccagatctccctgctgggaggatgtgcaacttttcctatggagcaatgggaagctcctggagaccctaaagaaagccaggggcgtgcatattagagaaatgatcagggaccatgaatgggtgcaggaagcccatgttgcatactttgtcaccaccaccaccaccaccattgtctgagaacccaagagcagccatgctctgaggaggggattaccattcactttccttcagctttacaccgagtcaagggaggcatcgttacccctattatccaaataggcacagaggtttaagtgaattagccagggccatccatggaccacggtgaagttataacaagggtgaaaactcatctcggtttgccagaaacattgtcagttttaggtgctgaaagtctctcgtcccaggaaaccccctcagccctgggcagatagggacatgtggtgactctaacataatttatgtctcttttcagagacaggcccatatccctctcatggaagccctcgctgaccccgtcccctggggccaggcctgagccagccctctggacacatccccttggagctgggaaagggcggggagtgatgtcgggatgttgccaggagagttcctgggtgtaggagctatttgtcatcacctcattagaagggtgccaggttcctaaatattgcccgcgattttgctaaatgtatctgaacaggagtggtgtaaacgctgtcagagatagaggggagagtgatggcaccatccaggataatgaactgcttagttaagatggatccgtctccactcctgatccacttctcgataccgcgcttagtggggctcacacatcgaggctgattggtggcaaatttaatgccctgaaagacagagctccgtcttcagctggtggctgagtaattggtggatttgcttctctaaggaatggtgttgagttgtacccaaaaggaaggtgggaaggtggcctctgcttctggcctcccaggttcaggctcagttagcatctgatacggggttagttggagcaggaagacccccaaaatcaagctcccttctcattttacagatgaggaaactgaggcccaggaagagggaaaacttgcctgaggtcccagcgctgggtggcagtgttgctgagaccagaactcacctctcctctgctcttcaccgctgtgctcctggcttcccccacccatgcctgctcagctgtgcctcctcattcccaggggctccataggagggatgaaccccgaagtgcttccattcagaaacctctccaggagggtccccagcagaagccttcttgagcctcctctctagttttatgtcctctgcctcgggggaggatctcactttgtgggtctcctgactttgaccccagcctggatgagatgtctggctgagctagtcatctctgaatcttctcttctctccagtcagcttccagatgccagtctctgttctttcaacctctaccttggagctgtctttcctagactggagagtggaatgctggagggagtgcaggcaagggaagggggttggcgggaagcatggtgccacctcgccctgatccaggatgtcctgtttgggtagagcttgtgttgaatgaagccctggaccatgctttaccactttggaccctgtgattattcctgcatccacattacacatggggaaactgagtcccatggcagtcccataacttgcccaggtcgctactgaatgctagagtgagaaactcgattctatcgacagacttcaaattctggggaggtacatgggtggagaagagccaggaaggatggggaggagattttcaggaaaagaatccgtgcagggtatgtggaagatgatggaattttgtgagatcagggctgggggaatattaattggacctagaggagaacttttcctgtgtttttctcttggaaacagctcccttgctatatgaacccttgccatctcctctcctgtgtgtgtctgtgtctcagaggtgttttctcacctgtgatccaggtgttgattggtgctgtcatagccttgcctggcacatctgttggaaaatcaccttgctttccaccttctccctcctcaccccagccagagagcccacctccagacctgagacttagaccccacacatcacctgatgtttgtcctggccttggataagaagggtggagcccacagctcattgccaggctctgacctcaagccctgaggcagtagggtctcccctctgcccaccatctctcacgtgagcctggccccaaccccaggtctctctgtttatggttcctatcattcagtgtgtaattctgggtcagtcctttccccactcacctggcccagctcctgcactggcttccctgccctgtctgagagccaggcagctggtgaagactcagtggcaatcgatggagctgcaaactgggggataccacccagaattcccaagagaccccatcaagtagtatgttctgctccagccagtagcaagaagtggtagaaagaagttggctttggagccagatagctctgggttcagatcccagcttggctgctctgtccatgaggcatggaatgaggtgctccatagctctgaacagtagctcgttcctgtctgtgacagaggcatatttacaggagggtacgaggacccaaactgcctgtgcccatgaacgctcagaatgcatcgcttattgtattcatattttaatactctactgatattaatggaattcatattccagaaggagaggcagatgtgcaaacagacaattgcactccagtgtgacatactcatggtcgtggcatcgtacaaggcactggttgctgcctgagctgctgaaaaaatgggagtgagagtgctgggaaaactaagtgacacatgctcaggcaaggagttttagtccttagagctaaacctgtctctgcagcctggaaaccccactccctcagcttcctgcggggatgagaaggggagtgcccagctacgagcatttctcctcctggctgctaccatgactccaagtagggccatccctggaatggaagacacagtcactcctgcctcggtttacagtggtgtttcccgacatttgttttcaaggactccagcagggctgagactagggtgaagctagccaggtgcacagggggtaacattcaaagaggcacccactcactctcaggatggtgcaatgagacggtgtcctttaattttgcactgcaggccccttgcttgtctcactgtattcgctcccattcctggctcaggttctacaagatgctctgaaaaagatgggctccagagtgtaaaatatgaagaaaaatttcccactctggcccaaacttggagggtcacaaggcactgtgagcacacactccagcttcagggcctttgcgcttgacatgtcttctgcctggaatgctctctcctcaatacccctatggctcacaccttcctttattccagcctcctcagaagggcctcccagggcccctctggctaaagaagcccctcccccattgccttctatcacttcactctgctttgcttttcctcattatgtttatcaccactggacatattttccatcatttatttgattatgggctcttctgctaaactggcagctccatgaggacagggacgtgtctattgttactgatatgtccccattgcctacaacggtgcctggtacggaatagattctcaattaatttgtttttcatgcataaaggaaagacaggaagaaggaaggagagaaagttaagagaagtcctgaagggaagaacgggtttaattatacttaacccaatatctcttaaaattcatggatgttggaaatcatgttttcctgccagacatggtggctcatgcctgtaattctagcactttgggaggcccaggcgggtggatcacttgaggtcaggagtttgagatcaccctggccgacatggtgaaaccccatctctactaaaaatacaaaaattagctgggtatggtggcaagcacctgtaatcccagctactcaggaggctgaggcaggagaattgcctgaacccggtaggtggaggctgcagtgagccaagatcacaccactgcactccagcctggatgacagagtgagactctgtatctctctctctctctctctctctcacacacacacacacacacacacacacacacacacacacacacaaagaaatcatgtttcctgaaacactggtgagaagatccctattctctgcacactctgggaaaagctgtcttgtcttaacctgtcagagccaccccactcctgcacacacttcctgattcacctctaagactgagtgcgtatgcagtgggctctctgatctcaccctggcatgcctctgtgaattctactgccccagacatctgctgcgcctgccagtgctcctaacactaccacccaatcaccagagctgcaaccactcccctacttgccctccccgccaccgccacacttacacttgcaattccctcatggcttgccaacaaatggtgaccctccatcctgccctgcctgcctcacaggcacacaccatctgcacccacctcgggctgctcaaagatttatgcatctgagaatatgtccttccctcctctttccagtgggaggaggaccttcatgagccttgatctcatcagccatctggactgatgaggctcaactcataactatatctgcaaaggtgagagagagcccaggggagggcagcctcactggaagattgagccacgtggctcagaattgtggccatggggtcaggtcctcaactcctatcacagttcctgccacaatgcccatcctccatctttagggctggaagaaaaaagtatgcaggctgcagatgtacagtgtttgccactttctctcacctcttccgagaggctgtaatagcgtggtggttgtcatggagcccgaaggtttgggtttgaattccagctctgtaacttgcagctgtgtgatctggcaggggacttcacctcttggttcactcacagaaagtgggaatcataatagttcctctctcctaggagtgtcctggtgattaagtgagtagatgcatatcatatcaagtgcttagcccagtgcctggcacaaagcaggtgtgcacatgtgagccagtatcacaatgttacactcaggcttggcttgcccggaggtctccctttccgtggggtctgtcctcctgaaggtggcctccttgtttgtcatgccccatggctgggatcatccaggctggatcagattccctctgtgcccacccacaggcccccgtccgcctacctagaggctggctggtcacctgagtggtgactgtgttgggcatctctgtctcaccctcactgcttgttcctggagggccgagcaatgcctgggtctctgcttcccagatcctggccccaggcccgcacagggtaggtgggagtgaactggggttgagtaaatgaggaaaggaggatccgggttggtccttctgatcttggaagttggaccggttggttgtggttgtggctttgtcagaccaagtgggctccagggctatccaggggcttgacctctggcctaagttacaggcctccctggagtgagctccttgccttgcccctcaccctggaggctgggtcctgaagccttggaccgtgcaggtccgctctgactccaacttccaaattgatcctctccaggtcgattcttgttttgttttgttttttgttttcctggagtgttgtaaccattgagttccaggcaggggtcaggcccatgggctccatctattcagcttgcctgcacaattgaaatcttcgaacccatcctggctagttttctcattaagactatcggactggattgatccattagatcaatgactggacatcagccggcaggaagccgatcagatgagcctggatgatcagcccaggaatgaggttcccctcggaactgcggtgaaggtccaggcctctgggatggggctagtggaggcagaggagtgggttagaggcctcaccagactagactttggtgtggagagagcagtgtccccaaggtgtggctaccagggcaagagtcccagcgtctgctccaggcactcccaggggcagctggtagtagtccgggaagcatcacctggtgtttgcaatgagttcagactcctccccagatagtgggtctataatggacttctctaacatatcaccactgccatggccaaggcttggacccgaccctccctttaggtggcaaagtatgtgtggtgggaaagccaatggagggtgttaaggaagccaatggtggtttcccagggctctctttttaccaggagtcatttgtttatgaggttggaaatggaggagtatgggcacttagaacaccatgtcccagtgtgtatttctcagatcctggctgcgtaggatggtggtggggcttaaggggtggctgagcgacccatattcaaataggtttggaaatgccaagtaaatacatttcggcattcatttcctgcaggaccgaatagatgaatcatgaatgccacaactctaaaaaggggtggaggggcgatgttggggcacagaagccttctctggggtatcttatagaaatacattgaggctgttcttggaggtgccagcaggtcctaccttcagggaaaaatgtgtcccaagcagaagtgtttttggtttggagggatccattggagccagggaggcagccaaaaaggagatgttgaagagagggaagaagagggtgattggctccatttgggcctgcagtcaccattcacagaaaccacagtgtgaacagcgtccctcaaagttgtgcaactacagaccccaaacttccctcctctgtctgctgtctccctggccctgccctcatcagcccagcccctctgatctgctcgtgcccttaccacccctttctcctctcttctgtaggctacctgacagtcaacattgagcctctcccccctgtggtggctggagacgccgtgactttgaagtgtaacttcaagacagatgggcgcatgcgggagatcgtgtggtaccgggtaagtcactactactgcccccttcatgcccatggccaggactggtgtgaggtcctcagagccctctggacaccctcactggtgtggctatgacctcagccctgacccagtcctgagttgtcctgggcatctgctgggtccccgccctctgctgacaccctccttgggtactagccatcccttctaccctcaggactgatctggtttccaccttctttgtgctcctattatgcccctacgcttggaaaactccattaggcaaagtagaagttactgagaacaccctggaccctgggcacagtgtaatcacaagtgatatctgatggtggaattttgagcatgaggcttcggataatgtttttggcaagggagagagaaaaacaggaaggcttcctgccttttgcaaaatcaaatcacagagatagtctgccacctaatctgactacgtataggactaatcctggtgtctggcaccatctgagaagggaattggttagagatgagaaggtacccacctgcccagggcccaggtgttggcaccaggaagaacagcttggaatcttgagcacaaggggccttttcaaccactgagtgaaatcttcttgtgtctggatggggcatcccagtcttctatccctttgccacaaaggaattggggctgggctcagaaggtccagggggcagtgatgcttttcttccaatgcatgcttgagtgtgcacagataaaggcaccaccatcctgggggagaactcctcttctgtcatctaaacaggggttggcaacattttttggtgacgactgagattgtaaatattctcctgtctgccaaacattcagtcttggtcacagttactcaactctgctggtatggcatcaaaacagccacagacagtgtgtaaatgaaagggcatggctgtgtgtcaatgaaactttactcatgggcaccaaagtctgaattttgtacaaggttcatgtgtcataatttcttcttctttttattttttttcaatgattaaaaaaggtaaaaactgttcttagctcgctggctgtacagaacaggctatagaatgacttggttcatgggctatagtttgcaaatccctgatcagaaaccacgctttcctaatctttgttgccctttcttcaaatgaaacggatggatagcacagttaggtggagctgttctggaggaagtgatggagcatggaagagagggcaaggaaggtggggggtgggcaccaaactgtgattcaagatctagagctggctcctctgctccttggagctgtcaccacatctacacacagagcatggaaactcagtgttagaggaatccctggggcatgcgtgctgttcatagtcttgactcagaacagctctcttcagtctccttcttgctcttggtccaggtgagctttgaaccagcctgtcttggctgctctgctttgcattttcggtctctgattcatggtttgcttgttgttgctattttgttggctgtgatctgcactccttctaaccaaaaatcatagttctctatttcagcattgcagtctctcctgtttagagttaattctagtgccctccacccaagctcttcaggtagcctgggcttcacaggtgtgaacctgacatccagcaccctagagggtcccagccttaaggaagggtgccatcctggatagatcagtgggcctagagaaagtcaaggcatatgttaaatagtgccatgaactgaatcactaagaggtgtatttacaggatatgggaactgcttggctgacacaggctgggagcatctcattagcacctggcagaaggacagggataaattaactccagctcactgctgatgatgggaccacatctctccctcagccatcccatagatgggatcagagggaggggtggtgaaagacagatagaaatatggagacccagtgggaacagttaatggagcgaaatggaaggaagtttggagatgggaaaatagcagtgggcacctcattgccttccaagctcttgaagcaactgtcctccctccggtttgaaatcgaatgttaccatagtcacagtggtgaaaatctccctgcagaggctcctgctggagttatgggcaatgctagtgccaggctgtgcccaggtgtagaagccaggagcaggtttccacatggcttgacttgatgttcttgaagatggtgagcaggactggggcaggaggatccatgtcctgggctggacagagactctcctttttcttcgccatcctccggtagggagaccctcctctctcccccactcttgctgcctaaccttgatgccactggtagttttaagaatcagtggcatctcttaccattgtcaggcgctgcatatcgggccatggtaggctgcactaattaatttattttatttcatttcacatcctttgactgagggcctctggagcaggcatatgcagatgtatgcaaatcacatgcaaatcacccactagagccaaatgcctgggcccttgtaattctgtagctggacggaggtggtggctcagctgactggttactgtcctcaggtctcagggagcccacgtgcccgcctatgatgggaaggatgggggcagaggaaggaaggaaattccagggaagggctccgtgtggccagtttttgctttctgccactctagctttctctagtgattgtctctcttcccaaagaggcagctgaagggagagagataagagcctaccaagatgggggctccaggagtcaaggtcagggcagggcttccagagggaatgggagcagcagcaacaggagctccagtctccttctccagccagaccctcctctgaccccttcctcccctgccagacgaaccccccactgtggcttccttccccatctccctctccccgcagcctgcccccctcctccaagcagggagctgccgagtgctgtttgttttctgtacgtgtgtttgcttcccgtcccagcttcctttctccatcctccgtgaatgagcttacagagcccggcttggaaggaaatgaatagattacacaggcccagtcaggactgtggctccaaccccgttagaaggaagaagcagggcattgtgatgaggccgccactgcctgctcagcacagtgggcacaaaatggcccaaaacatgtgtcaagcccagcagcctcccctctggtcctaaatacattatcttagcaaagggatcatcctgagctgtcagaaaacatcatgaatgcattggattctttgggtaaatcagggcagctgatgaaattatctgaagccatagggatcacctaaccttggagctaacaaaacctctggctggatatttgggaaggtcttgcttgtggacccctcaagggaggggaaggaaattgggaggaagcggcaagagcctgactcttggacactttacccccatggtctggccaagtggggaggagctcagcccgtttgtagaataagatgccaaaactatgagaatagactcaaggaagtatgtgtaatcatagccccttggtctgggttgtccaatatggtagccaccagtcacacgtggatgttaacatttaaattaaatcaaattaattttaaaattcatttcctcagtcagactagccacatttcaagtgctcactagccacctatagctggtggcctccatattggacagatgaagtatagcacgttcccatcactgcaggaagtttcactggataacctgctgtagaacattgagattttcttttgcagcctctggaatacactgtgctcacctgacaagagaatagcagtgagtgatcattgagtcagttttccaggcaaacttgccctgaaatgaattttagtaagatggatctcatttggtaacctgacatcattagatcgtgtgtgtgtgtgtgtgtgtgtgtgtgtgtgtgtgtgtggtgagggagggtgaaaaaagggagatggtcatcatgctcaaatcacttctttgaaaacataaagatgtcaagagagttgtcatccctctaaggtgctgagtatcgtagttgtctattaaagccctgtccaacttgaggatgcttttcaccatccccctctgctttctccactgttacatgggttcatctcccagatttgagtgtccaggcttcatcttcacagctcatatagataagctccagacagcttttttttggctaatagagtaggggtgcaattccatatttcaccagtaggaggctgtcagctaataactaatctaccctagcacttaagttgggacttggttcaagaaaatgaataataaataatgttctttacttaatcattcctatttacatctgtaactggggacttatttattaatgctgcttatactaatttgagtggctgacattattgagcctttactatgtgtgagcactagatcaagtgctttacatacgtgatgacatttcattttcatattttcactgaaaggtagatactatgattaattctattttccagatgaagaaactgaggccattcgaagagactgtgtctcgggtcatgttgccttccctgacttctccagaaagctgtaggcacaccctcctccatgaatcctctgtgtgggtctttacactagtgcttacctcatcatgtcaaaatacctgcccctggaccatgactatctgaagagcaaagactgtcttttctcctgctgtattcttgacacctagagcagagtcacctcagtgaacatttgctaaattaacaaatcatggagctataatgtgcacctgttgacagaccatgctatgtagcccacttctgtctcatgtgggcatctgtgtaatgttgatagtatctgttggtcagggggtggggagtgtgggtctttggatactcagggggctttgttaagtatgaaggaaaagggaacatttcttattaggaaacactgtctgaactcatttggttggaggccgcctgcccagcaggcaaagccgaaggtctgtttatatcatggaactccattaaacagccacagagaatcatgggagtttaaccttttacagcagtttttatcatccctcctttgttttctctccttcttttacaatttgttcccaggagccactctgggcccaggttacaaggccacagaaaagagagccagatagagagagaaggagatctacaaacagtgataacatccctgctttcagtacccctttatctcacctttttcaccatgtgggaagatgcatacctgggtgtgtgttttgtggtgcagatgatgcgacctcgccaggtgatcgtcccctctgggttctgctggatgcctctgcaatgagggtttgtggttgcttgggaccatttgaaaaggaattgagactagaggctgggaaggctgaggtaggaagagagaggacttgagcatcagaatacctgtgtgtgagtttgaccttgggtggtgacctaacctttcagccttttagaaacttcacctgaaattgggcatgaaaacatgtattttgtaagcttaaatgagataatgtctgcaaccaaaagaccccattgttcagctcattgtggcacctattcaatgatagctattgtcatttcatgtctgttgatagcttacaggatctagagagggaaattatagaataagaggggaaggtatttggggaggatcaccacggttagattccttgaattccatcctaccacctgcattcccaagggatatgggcagagacaacgctttaaatggttatgctggtgaactcactgggtttcaattcttggaaacccagtggcttaacacagttaagccatttcaatggattttagctctccctgaaacagggagctatttcaaaatggctttactatcattggctctctctcagtcccagcccttcacaatgtttcattatttgaagcaaaactgaaaatgatgatcctaaggagacaggaaacaatacagtccaaccatatcataagggcaagaaggtaggtacactctcgggtgaccaagagagaccagcaccaaggtcccagaggatgggtctagacaacccctttggcccttcttgcttggcagccactcatcctggctgctctttgctactcctctgaccccacattctgatcttgagttcagatcttacagatataagtctggaaaaggatgtgagtgaggaagacaaaagccagggttgagccaacccaacttgccttgtctaggcctccttccccaacccctggccttccaaagagccaggttctccctgatgaggtatgtccagtgctcagtcttatcatatcagtcacatgggaaggaagagaaggcagccagagagggcccaccaaacaatagttgattttacaacaaatgtaataacacataaacaggaaataagaacaagttcccaggtctacttccattgtaatctgtattcgtctgttcttatgctgctataaagaactgcttaatactgggtaatttataaaggaaagaggtttaattaactcacaattctgcagggctggggaggcctcaggaaacttacaatcatggtggaaggggaagcgaacacgtccttcttcacatggtggcagggagaagtgccagcaggggaaatgccaggtgcttataaaaccatcatgtcttgtgagaactcactatcatgagaacagcatggggaaaaccatctccatgatccaatcacctcccaccgagtccctttcacgaacttgggaaccacagttcaagacgagatttgggtgggggcacagccaaaccatatcacaatcctttaattcaaccccaaggaaaactccacccctaaccacagctgttaagttgtaaccatccagactcatcacactgagctcctcctcctggggatggggtgatgggagaaaccttcagctccctctagaggccagagtgtgaatcacaatcattgcagccctgatccttgatctttaatggaagttctattggaaaccggcaggggtacctgactctgacagctcattagacttctcagaggccactaaaaatacactgttgtctgagactcattctacagttattgaatctgaatttccaggactggagcctcagggcatttgtacttttaacgagttccccagatgacagtgacgcactcaacccagccacggagcatgtcatggcgtttgtgaaactctgatagagggagctgttccatgcactcatccaacattaattcaacacatatttatgaaaccaggatggttctaggcactgggatttcatcaaggaagaagacaagatcctgtgctcacacagtttaccatgggggaggagttaaaaagataaacaaataaggaagataccagctaatgataagcgcagtgcatataattaaaatcgagtggtgggatagaaagagattgtgtggtcaggaaaagacatttaagctgagatcgcaaaggcaacaggaaacctaccatgccaagggaagaaggcagaataatccaggcagaggggaaagcaaatgcaagacagttctgtgggaaaaagctttgtgtgttcaaataacagaaagtgcatgtggctggaacaaaacgaatagggggtgatgttggaaaaatgggcagagaccgttcataccaggccctgtgctgtaagaaactgaatctggagttattctaagggcaccaggaagcattgagtttaagcagagaagtaacagggtctggtttactttattaaaaaggtcacttctgggtggagaatggtttgcagaggaggtgagaaactggcagcagaggggtcacttggaggttagaatagttcaggcaagaggcaacagtggtttggttgactaccaggatggtggtagtggagatgatggaagggaaaaatgttctgcttatgatttgcaggtagaagttaagggcttgctaacatgtggaagggatgagagaaggggggattcaggatgactccctgctttggggcttcggctgggtttgcaggagcagtgctatttaatgagacagggaggacaggacaggagaagcaggttgcaaggtgatatggtttggctatgtccccacccaaatctcagtttgaattgtaataatttccatgtgtcaagggtggggccaggtggagataattgaatcatgggggcagcttcccccatactgttctcctggtagtgaataagtctcatgagatctgatggttttataaatgggagttcccctgcacaagatcctcttgcctgccaccatgtaagatgtgactttgattctcatttgccttccaccatgactgtgaggcctcctcagccatgtggaactgtgagttcattaaactgtccttttataaattacccagtcccaggtttgtctttattagcagtgtaagaacagactattacacagggacaggcgtcaagcactctctgttggctatgttaagctgggagtgcctctaagacatggagatggagctgctgcagccgctattgaggccacaaatctggaatgttggggagaggtgaagcctggagacttatacttggcattgtcagagaatggatggtacccagtgctagacccttgggcactccaatatttagagatagaaaagtagaccaacagagaggctgagaaggaggaggaacagccagcaagatgtgaagacggtgaggagtggagtgtcctggattccaagaaaagaaagtggtttcagaaatagtagagtcagctgtcagctagctgtgtctcacactccagtgagtgacttgagagcagagaaatgaccatgaacttggtaacatatggagcccactggggacctgggcaagggcagattccttggaggtcgtgggggctaatgcctagctagagtgggctgaggggtgcattgagatcagcagtaacatggccttgagattttgtctagtaaagagttttgagcttgaacatctgaacaaacctttgcaagtaacatgaagacccaattgcttctattgaatccactcctatttgcatgtcattcataaaattacaagcccactgtcttttcctaccatccttagcctttcaatctgggactggtggcagcctcgctctcctcatcgagaatgtgaaagtggcagccgagagcgtttaggggattctagtgtaattaaaaaatgcatttggtatttgaaagaaaaatcctgctctaccatttaattaactcagtggccttggatgacaactattcccaaaacttcctaggcactgtacacaggtctgaaggtataaagaaggacaggtgggcccactcccctcgaggggagcgcttcccgtccagttgcccatcatcaagttgttaagttctgtttcatcacctggccaatgggcttgactgcactttccctaaggatctcacaaagatttgtgcaaaacagacgaaaagccccacagacgagctgcttctgtcccccgtggcgcaggggaaataggcttcacatatattacttcatcttctcttttccgcctgggcaaatcttactcattctctcctctgtgaagccttctgacccctctcaccaaagcagaattaagagatcacctgctgtgttctctcagcgttttgtacattcttcaattagagagacagcacctggtagcttagttattcatctttgcatctcttgcggagttttatttttccgcttctcctatgtgtcattcataaaattacaagtccattgtctttagcctttcaatctggaactggtagcagccttgcactcctccttgaaaatgtgaaagtggcttcccagagagtttaggggattccaatgtaattaaacaatatatttggtatttgaaagaaagatcccgctctagcccttcatttatgaatgatccttgggccagggattctatgtgggggcctcagggtccctaggaaatatgtggatgggcttctgggggtgctcaaaccccagaaaatatgcctaatatgttgtgtgtgtttttgtgggagaaaggtgcagaatattctcaaaggactctgtgatgcccccatgccccaactgaaaaacccaggaaatgcaacagcaggcatgcaggtgttcgctgagtgtgaaatgtgtagggcatctcattatctccactcttgggtcatcaaggtccatatttaggttggctctaccagaccctgtagctgcgaggttgtgccagatggcccatgagtggtccacgagcttccaaggagtgcagtggggaatgggggtgagaggtgaggcagtcaaccttaggcaggaagagctgctgtgtgattgggatccgtccagacaccacagctcagtcagcctggatttgtgcacagatgcccttggacgggaagaggagataagaagcagggtggtgggggaagactggctttggccacacatcactgttctccctggcttgaaggggagcggtttttgaccaagcaaatccatcttctcttggggattaagatcagtttctgataatggcaaggagaccacttccctggtccacatggggttgataagagctcttggcttccaaactcttgagagggggtgccaacagctgaagtggacacccaaataaccaggtgttttgttagaccacatgcagagtccaccagtgatgggctcccacactgcatgggtgagaaagacacggcatatctaaggataacacactgatggctcagctcacttcacttaccaagaaaagaaaagagcaagggcctgggacacaccatcctgctgtgtgatcttgaaaaaaccacaacccctctctgagctccaggatcttcataggtaaaataaaagcgtgcagtgagatggtctctaaggaatatgcagcctctctcccaccttgcggtcaacctccccaccccgctatcttttccccagaagactcagagctaatggaagaggtgggtgcctcccaggtcagggcaccccccagctgaggcttgaacaatgctttctcaggggtgagagtcctggcctgagctactactgttggggcctccgagcacatggaatccggaagtatattaagcccaaagtgtgatttccagcagattcttcctggctttcctatgccctgttgggtttaaatgacaaaggggctgacttaacttgtcggaaaaggattaaaggtgaacttcagctccagcacaccagtgaaaagaaaagaacatgactgaaatgagggatgtttcccagctcagactcaccatccctcctaaatcctttctcccctcctctccccacattttccttgttgggtgtgagctcccacagggcaggcagtcttcccgttgcagacaggcacagccgtgtgcttttctaaaacacatatctgaccttaccacgaccacccctccctgccccacacttcgcaagagcttctcatcacctgaaagaccaagttcaaggtcattggcccagcatacaaggttcttcttgattcaacctctgttgactgatttcttcagccttgcttcctaccacgttcccaaatgggcccaccattcgaatcatatggctgatttgcagttctcagaatgtgccaacgttctttcccacctccgagctggtgcatatgtgctgtctctgcgtgcaatgcccttctcccctccatctggtcaactcctacttgccctccaaggcccagcttcagtgttgccccccctccccgccaccagaggcttttccccatccatttttcccccttcaatcttcttccacattcaactgccatgacccaggctgagttagcttctcataacactctcaaaatactaagcacgtgaccatatgactcaacacactggactcatgtgttcatttttgcagcagatatttcttgagtaccaactagtgccaagccttgggaatagagcacagaataagaacaatgggctgggcacacacaggctgtggctcatgcctgtaatcccagcactttggaaagctgagaaggatagatcgcttgaccccagaagttcaagaacatcctgggcaacctgacaaaaccccatctctataaaaacacagaaaaattaaccaggcatggtggtgcttacacctgtagtcccagctactcaagaggctgaggtgggaggatggattgagcccaggaggtcaaagctgcagtgagctgtgattgcaccgctgcactccagcctggaggacagaaagagaccctgtctcaaaaacaaaaacaaagaaacccaaaacaaatacgcaaaacaaggtagccctgtcttttgtggagcttgtagttaagcgggaggaaacaggtattacatgaaagactgtcaaataaatgcttctttcaaattgtggtcaccgctttgacagagaaagacaggtgtctgcttgctgagagctcatagtaggagatgaactgtaatagttgaatgtctctctcccagaatgcaaaccctttgctggcagtgaccaggtgtcctgtttgtctttctctcctgagtgtctagcatgatgctgagcacatagcttagaggatggatggttggatggatggatagatgtatgcatggatggatatcttatgtggccctgagggtcacagaggtaaacttgtagttgatgaggttaataactttcccacagttggagcttttcaaccatggatgggctgtcttaaggactggtggacttcctaaccctggaaatgtctaagcaaatggcatggccacctgtcaaaactgcagtaggaagtaatcctgggcccagtgcacccagagctattgaccctatttgtttcagctctggaattctgtgctgcctcaagctcagctgcgcagccatgatatcatgacaaggggtaagaagcagagtgtccagccaacctggctagttggggttgagtatggggcttctgtggaaatcaggcatcagaaagttccagattccccaggagtagggttatgtgactgttctgagaagcagacatgtgtggctgtaaatgtccagagaaagtgccccacccttgagtgaacattcaaaggtgaggccaggggacacctgggagttgagaggagggggaggatgtgaacgaattttatagggttcagaagtccactccacaacttatggccttatacaaagcatctctgtccatgccacactgctttaaacacatcagtgatgcctttccatggttcttaggatacagacaaatatccctggtgttgccatacaggactttgcattgtctggcccctgcctgcccctcgaggctcctctcccagtatgcacccataagtgaagattctggggatatcagagacctcagagagccttgagagaaggaggtagaaggactagagtcagggagactgaggttaggtgaggttaagcaacttgctcaaagtcctgctgctagatagtggttgagtcaaacttcaaaacccaactctctgactacaaagttcagctctttctgttaggtcccattgaaggccataaataccctgttaggggttggagggatttccccctgagcgatgggcagtatgaggactggaccctcgaatgcgctgaatccctctggcttggggagcctgtggcaggtaagacaagccttcctcccatctccctcatatcatcatgaatgccactgctgtagcggtgcgttcaggtcaggtgctgcgctaggtatgttacaaagatcacctcactgaatccatacaggaatcacaagatgccggtacagttgtccattttagggttggggacattgaggctcagagaagttaactaactgaccccaagtcttgcatatggtaaggcggaaggggtttgtctgagtccccttagagcagcccagccttctcactctaagctgatggagtggtctggatccccctttgggaagctctgtggcctcctccgtgggggagagatggagatggcctgggggcagaggagcttctggacatggctgcttcaggctgtcctcatcatcaccctgccggagccatctgtctgcagtagtgctgcggcacagatccacacagaggctgtcaacgtcaaatgaggacttgagggaaaacagcttccaccctgcagagatgacacaggcagcacggttcacctactctgagatgacacaggcagcatggttcacctactctcagcacggcagagcagacaggtgtaaggaagggccccttctcccccacgctgcctccctgcatgcccctcccaagctggactctcttttggtgaatggtggaaaatgtctagcaaaaccgtccacggctgaggctgcttccagtcatggcacacagacctcaggaatcccattaatgagagggatggcttctgaattggataccattcttcaagaaaggaagttgtattattattattttattattttgcaaagtggtagagtaactcaaatgagtctaaacaagtattgtcaagtagtggttcttgggggacctgctgtaatggctataatagtcatttcaattggcacattaattatatgggagcaggtgcttctaaaataattgagggtgtaagaaggctgtttatttccttacgtgctttcaacgttccccttcaaccctctttactctatgaatatcaagtcatgcaaagcctgttctttggagacagagaagtgaagcctgtctgaaatcgcaggctctaatttagggaagtctccagtttattcgttcatcccttcatccctccaggtagagaactaacacctgcagaaaaccttggcagggccttggctgcagcctagagatgccatccctggctcacactctgctgggggggacaggtgtcatgtgacccgcacccttgtctggagctattcaagagtgaggaagggacagtgggcatggcaagtagaggtgagagcaggtgcaaaggcctgggggtggcccatctgactcccatcaggcgctcagtgaagggtcaggaagaggggaggcaggaggaggaggctgagggcaatcagggacctatgccaagtctggggtgccctgcaatggagcttgagctatatccaaggggaacagtcaagaaattttaaacacaaaagcatcatcattcgattttaggaagctctggacccctccctagagatgtctgataagcatctcagacttaacatggccaaagcaaagctctgcatttcttccctaaacctacccctcccttagtcttctccacctcagcgaacggcatcaccatccaccagtttccgaagcgaaaaatctagggcgtctctcctatcacatctcatcccttgcccctgcccactccccgcatctcttccatcgaatccgttctaaaagacaagccctgaatccactgcttcttccccattcctgggcctccaagccagctgaagcctctatcactacttcaagtcagcaccctcctgatcacactctctgcttccactcttgtcccctcagcccccaaatccagtatccaccaagcagccagagtgaccttttgaaatcagaacagtcttatcattcctcagttttgcctgatacttaacaataaaacccgggaggcaccacccggtctggcactgcccctttctggcctcgcccactccactacctcccaccacaccagcctcatttgggttctgtaaacaggagccagcccacacctccagatccacgatgtgcaggcccttgtgttgggtgctgctgggatttcaaagatgagcagcatgaaccctgaggagcgagcatatggaccagcagtgaagatgctgctttgccaaggtgcctctagagacagaaagatccaagagcaactcctgcctccacctcttcctctgtcacctcccccattctccatatctgtgtctataaaatgggatggtgataatagcactgacctcgtggagggccatgacagcaaccatgcaaccaagcatgcctggaacagtccagatggcgcttgttatctgagggtgactgttaagagcaacccttgttcagcctcaaaagtgcctgatttggacgacaaatgacacttttgccaatgcagcattctggaagcgctttgcaaatgtcgtttctcaggatggtgctctacttctctgtgcacatagaccatgggacagattcaagggcagcgctccatgcattgcccccggtcgggagatttcttaagctacaactctgggcaatggtagaaagagggacggagccctagcctgccagatgaaaagagctgactttggaattcacctccctctccctttccagcatggaccatgggccttgatcccacctaggtgttgggctgtgatgggcaggacaggaatcacggtttaaggggttgttgcaggtgatgctgggtgggcctttctctgtgtctgaaagctcgtgaaggaaaggcaacccagtcacccaggagtggactcaatgccggaacaatggatcccttgcacaagtccagctgcattgctgacctatgtggcctttccaaactgtgccatacgtagagcctgttgcttcatctttcagcaaatagttattgagagccctctgtgtctcaggcctggtgctggatgctgccacagaggcccctgccctggtggaataaaggaaactggtaattgcacattgatcttctatgcagacatcttactgacacttatcagtgctaatagattttttttattttgatcttttgcattatgatgtgaaaatattatctgcaaataataataataataatacttctcctctcaatgcctgagagacagcatttttaaggtagaaaaatgtatatcctggaaccagatcacttggattcaaattccagcattgccacttagaagctgtgtgacttttaacaagttacttaacctctctgtgctccagtttcctcatctcatgtaatgaacttaggacagtgcctgacgctatataaatattggtagggctatacttattgaactgattataatttcttgccttattccattgtctaaaatttccagaatgcttgtaaaaaagggtttccctgtcttattcctagttttcataggaatgcatttataattttaacattgcatatgatacttcctgctggcttctgataaatattcttttttgttatgaataggaaggttacttctattccaatttcacctagaatttttataaagaaaaattaattaaatgctccttaaaaatctattgaaataatcatatggtttttctcctttaatttactaatgtaatgaattatgttgatgtttttcctaatattgagcctccattgggtttttgtaatttctttaaacaaatagcttgtgtagcaaattaaaagagctctcaagtatttgtttttttattattataaatgggatctttttcattggattttctgtgggtctctgggatgtaagaatgcaattgattttttgtggctttatcttgcatcctacaaattagatgaattcattttttttctctttaataagcatgtagtgctttctctgagttgtctaggcatccagtctccccagctgatatttttgtttccttctttcctgtatttttagatctattgcatttagcaatgagcaagcatgtgttgagtgcctactatgtgccaggcactgggctaggatctgtttcctctgctgctgttgctgctgcttggcagggtgggtggttggagtaccctcttcagctggaatattgagagcaggggccttatgagggaatgaatcccaggaggtcccaaaccacttagagtcagatcaggattcaaacacattaaccctcaggtcaggctgcctcctgaccgatgactctccccttcaaggggcaggggtaattaaccttgacaaagaaggggaaaccaaagcttgggaatgcagcagtcatttctggcctggaggtgaagatagatgcccttaccctgcaacctggccttgaatggtccagctctctgaccttctttttgttcttgcatctgggacttgctgctattaaacaggagtgaaagtcccagttatattttgtttctcttgagcagcatcccagctctggggggtgtgagatggcatggcagcatgctgccatcccaggccctccctgagtctgtgaatgaggccctcttgcttcctgggtgaatgtcactaagaggctgatggcatctcagtgcccagtgggcccccctcactgcctggcatgactcttgctgcctcaggtcccaccccttcctgcctatagatttgcccttggtttttgagctaattactccgtctcatcactgcactgactcttcccagcatctgacagccctatgagcgtgtatcttgtaatctcccttcacctaacacaagtcagcttaattatgcatgtggagcttaggactccaacctccaggctcatactctgcaattatttctgtggtcttgtcccctctggcttcctgcaaagatggcagctggtgtcttgctgtggagtccctggagttacaccctacacggggtgcctgactgagaaggcagagggagctagctcggtatgtgctgtaatctccaaactccatgcttgggacatcttttattaattcacactaaattgcagtgtggtttgtggcaacctgtctagcgcaccctggcggcaccaaagagctgccctgtccacaccaacaacaggcttgggagcctcccaggatcccgggaagtcctcaggctctgcaccctgccccaggctcttggcagactctgtgaagctcaacacatctgagtttggaagctgctttggactcagggagaagagagcgaatctttgttggttattgatgctgagccaggcactaagctaagagctctccatgcaccaccggaaggaggaactacaagtagctccattgtatagacaagaaaactgaggcgcagagacgtgatgtgaattcccaaaagttgcagagctggaattcttttttttttttttttttttgagacagagtcttgctctgtcgcccaggctggagtgcagtggcacgatctctgcacagctggactttgaacccagtgcttctaactccagactgccactctacccgttttcttgttcccttgagatggtcaggggatgtgaaccttccacttcacaggggctgccagccttggtgaccccaggatgggggccagctctgtcaggcttctggaggcaagactgggtgcctggactgtgctggggattgaaggagcaggtacatccccttcctcccctgggccatcaactccttcatccgcctgggacctgctgccagcctcatccaccacgtgtctttgttgccctgggtggtggcagggaatgagggtgccatcctttgagtgtgagcttctggagctcttacactcaaagcatcagaggtgaaagtggcaggagagtgcccagccaggaaccatgggccaggaagcagcccatcctcggaggtggcaggtcactggcctgtcaaagcctccattcccttatctgcaaaatgagagaagtaacgcccctggatggggtatcgcagggagaaaatgacatcactctggcaagggctggcaaataatatcaataccaataacaagctactgtttattgagcactgactatagaccaaatgctgtctaaacacttacatatatcagcttatttaatccccatagcaaccctaggggtgggtactgtcattgtccccattctatagatgaggagacagagacacagaaaggcaatcatttgctcaagatcccacaggatttgaagtgggattcaaactctggtggtttggcttcagcatctacactctcatttagtaccttctttaaaatgttagttcctcccccaaactccagccccacacacacgcagtctgcccaggcaaatagagccattagctataggtgtgagcactccagttaaaaattccagggattaaagcatctacactggcaaggatagaagtgtctacactgcaaggaggatttttcctctagtgctggagagaaatgtgcacgtaacaccaccaaaggagatgcaaccaggttattggggttataaatgtcccctaagctgagcttctgcctctacttcccttttgtttcttcaacactccccacaagaggctgtgtacacagtgggagcctggctgatgctggctaactggactctgaagggagacactgcaacgcatttcgagctgccagaattaacccctctgtacatctcaaaactttgcacagcatagcgggggctttgggcagcctgtcggaggttgatttctgtgatctggtgaaattctgtggcgtgattgatagattgcctttgtagaaaagtgatgctgggattttccattagaacagggaggctcgctgttgtggctttctagaaggtcagagggtaggagctgggaaaatgctacccaagcagacagacagtctccttcttggggccttgagagattcattcaatgtgttcacttcatgcctgccgtggtgcttaagacacagatattgataagataatatctgacaagtccacatggcgagttctccggtgcaaggtgctctgggtgaaaatccttcattcctccaacattcccacaccattcctttacttaacaaatagttaccgggcccctacaggggtgtcaggccctgtgctagttgctgagactaaatatagcgttgaacgagataggcaagttctctctacacccaaggagcttacatcctgttgggatgcagagcaggtaggcctgacctgcttggtaagtgatggaggggtacatagcatggacccccccaagccagactcgagtggtcaaggttggcttcgcaggggaagaaaagtatacactaaggtttgaagaatgagtagaacctagctgggagcctgcgcaggcctcctaaaatgagagaaagtgtggcacccccgcccaaattaaactggatcatgcgtttggaggccagacagggaggaggaaaggaatggatagcagccagagaggtgggcaggacccagatcaggtattcaccttggtgagatgcttgaaccttacctggagaacaaaggggagccattcttcttaagcagaggagcagcatggtcttatctgcttgctagctgtgaggtccttgaactgggattaggggagggtgggaggtgtaaggacagggcaagggctccaggttgagggcagctgcagccattcaggtgaaagtgatggcagcccgagttaggggatcagcagttgggggtggatcatgggcaataggtgggtggccaggtgcctgctagacacaccgcacagtgaacagatggctgagtgagaacgtggaggctgcttcaccagatgcagaaggtgagggagagggaaaggtggtgtgggaaggggcagctgtacgtgcaaaagcagtgtggacattgggggcagcctctctgggcttggagagctcagccggcacagttagatggccgccctgaatgaagcccaagctgttttgcccccgtggtgtctctcaccccgctgtgcctataaatctctctggttggggccagaggaatggcccagagccatgcagcaagagaagaagtttcagtttttcaaataacacctgccaacagttgctctgattctagatgctaggttttgcctccctttcctctactggcccacagttgtggatgggaaacccactggcacgggtgctggcaacagtcagactgcaccccaggccctggctctggaccaccttccctttgtgtgtcttcagcctcatttcctgctgccaggggaggcattggcaggatctgactctgctgccggctctgccatgaggcaggctgctcccctcctttccctggggagagaggtgtggacacggaggaggcagttggggccccagtgcccaacatggtctctgtgtctctgtctctctctttctcctcccctccctcctccctccccccttccatcccccactccctccctcgctccctccctccctccctccctccctccctccctctcctgctctctcttagttcaatttgtacaggcttttcagagaccccagggaattcacatgtgtattgctttgtaaatgttctgacgatgctctcaggtgccagggctgtgtcttcagcatcagtttgggagttccttcaggagcaaatgactgcatctccctcaacagactgggaacccctgaggccaagggctgaatgaagagaaattactaaagacagagtaagtgcttttgcacgtacagctgccccgtccacaccacttttccctctccctcaccttctgcatctggtgaagcagcctccatgttctcactcagccgtgtgttcactgtgcagtgtgtctaacaggcacctggccacccacccgtcacccatcgctgtctctccctctcttctttgtgctgtctcataaagagatatgtaattaaactaccttcaaacattatatggcgaaaattataaactagaaagaggatcgccaggtagttaaagccaggttgaaatctcggctctgccatttactggttttaacctctctggacctcagtttcctcttgtgctaagtggggatagtaactctaaactcacagagccataaaagttaatattcccagtctacaagcatttataaagtgcctgagtgccaggaactattctaggcaccaggatgtaatggtgaataagacaaacaagatctctgctttagtggggtgaggagacagaccattaattaattaattagcaagaaaatatcagataatgataagtgtggtgtagataatttcaggtgatgtgatagagagtaactggggcttcttagatcagctggccagaaaagatgcctctggggaagtgacattgaagctgagctctatatgacaaggagttagccaagcaaagacctgagggaagagcatgccaggcagagagggtatctatggatgggatgagcgtggtcacactgtcaagggattagactgtgttcttggaaaataggcaaaggaaaggggaacacaagtcagggcggtgacagggctttctcacattgggctttgtagatcttattcttagcataataggacttagtggagagtcttaggtggagagtgacatgatctaatttaggtttcaaaaaaaattatctggctgttgtgcatagactggactgtaggggagtgtgctagtcaggagagcctgcgttgtgccccactaacaaaataatcctcaaatctcaatggtttgttacaacaaaggtttatttcttattcacggaaagttggatatgagtctggcaaatctccagagctactctcttccatgaagtgactcagggatccaggctcattttgtcttgtagttccatcctctcaatatgcacagttaccatccaaagggggcacaaaaccaagagagtcatgtggattgctcttatgggccagtctggaggtggcttaagtcatttccactcattgtgtccatccacacggatgcaactgtgagggaggctgagaaagtgtagttttactggatgcccaggaagaggataatgaaacaagatttggggatcatacagctgtttctgctaaggacagaagtgtgtatatggaggctctcccaatcttcctgactaggagagctaagaggctctcctagtcttcctgatgagggatgatggtggcctgcatgtgagaagtggcaatgaggatgcagggaagtggacacatgtaacattcatacaacacttggtactatggctaagcagtaggcccccactacacaatagctcttattttaatatcctttataattaaaacaccttaatctttctttacaagatgaagtcatatttgccaaatgggttttctctgatttcacaaggtcaataggctggaacactttctgaccaaggcgtttttttttttttttttttttttgagatggagtctccctctgtcaccccggctggagtgcagtggtgcaatctcggctcactgcaagctccgcctcctgggtccatgccattctcctgcctcagcctcccaagtagctgggactacaggcgcctgccaccatgcccggctaattttttgtatttttagtagaaatggggtttcaccgtgttatcaggatggtctcgatctcctgacctcgcgatccacccacctcggcctcccaaagtgctgggattacagacatgagccactgcacccggcctgaccaaggcttttttaaagacatgctcataaaaccttggaatgtagtaatggcttttagagatgttcaagtcttccttctgcattttaacaggtagaaagagtgagtgcttcagaggtggccgtagctttgctccagtcacagaggcagtcgacatctaagcaggggccagggccagggcccaggtctatgtgcctgtctatgaagtcaagtgatttccggatttcttctcccccagcaagtccaagagtacaaacagctggggaagcctggggtagagtttctctcctggtcacatcagataagatctgagtggaagaggaggaagggaatcagagaggacttggtcttgcccacccaaatctgtctgctgctctttttccttcttgtgcctgagaaacaatatacgggggccgggggtacaaagatcatgggttccagcccacctctgccatttcctcactgttatatcttgagttagctacttaccctctctgaactttagacttcccttttagaaaagaaagctaatgatgccagcctcgccaggttgttatgagggctacatgagatagtgtaggtaacaaacctttagctcagagcttgatacctagaagatcctcaaccctggaagtaattaattggaagaaacgctgagcctcctctcctcaccttccccctcacacccagcaccctgggtgctgtccctgtgtcaccttgtaaaagcccttctggaattgggacaagcttaggaactcactctaccataataaatgaatgtgtccctctttccccaagcaggctgcgtttcccagcatcttcatccgatgtgcagggtctacccagccccgtgtttctctgctgtaagatacactatgcatccttggcaccttgcccagagggccagggggggcctcagcaaacccaaactttcctgagtcatctgatgggctacactgtttcctggcaccctaatgtccttaaatgaacttctgttgtttgccttgaatcaaattcactgggagcaggggagccaatgcacacccttgaggactgggccaggtcccaggatgggccacagcccatcagccttgcagaagctgcatgggccccttcgttgctccttggtcctgcccagagaacccccaggctggatcctaccagtccctgggatccagcatggctttcagaagtagctcaataaagagaatgttaaaaccttttaatgcttggcagggaatctgtcctttgccaaaacaccaattaaaggcccaggccagttcaacatgactttattactagcattttatctggaagagaagggatggggggaggtagcattttatctggaagaggaggcaatgaagcctctgggaaacaccctctctgcttcctctgacaggaacaaccccgcacagtcactgggcgcctgcttcctagaaggctccagagagaagccaaaagagagaaatgagataatggagtgaggttactcaaagaagcctttctgaaacagcagattttaagctgggctttgaaaggtggatcaagtcaggggaaagtggaaagaaagtgggggcttctcaggcaggagattctgcaggagcaaaggtgaggctgaggggctaatcctcagtgctgattggacactttcattgtctcaggaactgcgctaagcattttagacgtgatctctaatctttcaaaccaccctgggacacaggctctatgattatcaccattttgtagatgtagaagctgaggtttaggtgcttctacccagttcatgcttgtagtaagttctggagcctgaactaggcccaagcagatgatcccagtgcttctgctcttaaccccaggctgagaagtgagagatgagttggggagggctcaggcagatgtgaagtggagagagtttgtcattccttgaagtccagaggcccccatttccctctttttgagccattcactggatctagacctctatctgaatacagcgaatggctcaaaaccctaaccctaaccctaaccctaaccctaaccttatctagctccatccacacattcactggatctaggtatctttaaccctaaccctagagttagattcaaaaacataatcctaaccctaatcctaaccttatttagttctacccacccattcactggatcttgacctcctgcctgaacttgtccctgggccctggtccctcttgtcagctgtcttcatcctttctagtctagtaggtgccattgaaagccattgctcccaaaggggtatctctctgtcaggtggccttctcaggttgtggctgatggacttgaaattcctcatcaaccactaaataggctgttgcctgtgccactcctggacataggttgtccaagccaagtgtctggtggctctgttccacttctggaatcttccagaaactttgtcaatgcttatagcctataagagcatggtgattcttcagttgtttgcccattcttctatccatccatccattcatccatccatccatccatccatccatccatccctccattcatccagcacttattttgagccagtgacgttgtccttcttacactgggccctcagcactgtgggctgggactatctggagaatgaaggggttagttcacacagcctatctgccttcaggctttgtcaagggataggtgctttgaagccacaaggtgaaatacactgaccccagcgaaagtgacaaatttggccctgcccagatctggtcttccagtctccagccccttcctctgtagagatgtgcatgaagaagtgtcccagcacctggattacagagtgagaaactgaggcttggaggagggggctaagcctgcctcaagagcatggcaatctaaagccaaacttcactctgcactcccctgggtacctgctcattactcacccaccttgatgcccctgctgggcttgtgggggctttctcccatccaagcaggatggtttttgtcaagcccaatattgcccatggtcttgtgcagagagatgtgccctctgcctgttgcaatgctgtgattgggacagacatggacacatcctcacaggacacacagatgacaaaataaaggctcaaatcccttctcctgattctgccatcatgcccctaacttcctcattccctcacttctcatggccctccctttcttccacactcctcactctcatttctttggctctgttcatctctgttctaaatcattccctctttctttccctgaaactccctcttgattataccctgtgttcctctcttcctctctgcatcttacacctgctcacacacattgagagtcatcctcaaccccccttcctactgtttccccatacccaggtcatcttgctccaagtcttgtcaattccacttcctaaatctctcttcaatgtgcctgctcctcccctccctcctgaggtcccaaagtgctgttctagtccaccatcatcttagtctgaatgtctgttacctcccaacttgcccagaggtgcaggcttgtgcagccccagtccattctccacactgtagctagagggaactttcaagatgcacatctgatggtgtcatttcactgcataaacccctgcagcagcttgccattggcctcaggatggagtgcagctctgttccatgtcctacaaagcattacagaatctggcctctgcccaccctgcaccccatctttcatcagccccaacccaggccctcccacctgatgggctagccatgcaatggggcttctttctattcatcaaattagccatgccctccctgacctctgggtctttgcctgctgtatatgccctcctgtatgactagggtaattcctacccccctttaggctggaaatctttcctcaactgccaagtctgggtgagatgcttctgcactgagacgcaactgcactgcaatggttccctgtgattcctaaattacagcatttattaaagtgaattctaattgcctgtttaattgtttgctttcactgctggagccgcaagggcttagggtacaataggcttccagttccccaaggaaagcgtacagctgtctccctaacgtttgttttcaggtcacccagggagccggctcccagggctagccctgagagctgtccgtggtgctgatagttcccgtgtttcagcaaggggcagcctcactcagaaaccaccctggcggtgccctgtgcgcttctcctggatgtttcccaagggggaaggaaaggccttggtctgacattctgaatccacgatctgcccttcccagtggatcggggcctgctggtttgcggaggttcactgggaaggctttgagctgctgccgttacctcctggtaccatatttgcctctcagcatctggctatatttctgagacaggggaggagacatcccagccgcaaataatttaataaagacttttccatccgctagcctaatcccctcttcctccatcttttagtaccagggacatggagaccaggtcccctttcctaaaaccctggcccagttgccggcaagcggacactctctagccaacttctttactccacatcattccaggaactggctgactctctccatagctcacccatctcagttgcctcctcttctcctctcaaacccagccctcttggtaatattggattagcccactttcttgaaagctgattttctatttgcataatccttccctctcagagttgctagggcctccatgataagctgatgggccagggcagtcaagcaaattatactctttattctgaacagcattgaaagtgagggaaattattttttaaagaaaacacacgctttattttcatctccacattccttttgaccaggagcatcatgccagtgttgactgcactagcctatgtctcctggaatacatagatctttattttaccaaactacagcaggcagaatggaagtcagacctatggaaggtcttcttaatattaatagtggagagaatgcatatgaaagccccttgtaatggcaatacattactctttatatatataaatcatatttccacctgtcatctaatttttttccccatccaacactatagacaactgtataggtactttccccatgtgacagtggaggctacggaggctcagagagaccgtatgtcaagtcatggctggagtggaaactagagctgctgattagagtttctaggattcctgatgcactgagctcaattctggccaacaaacacttagcagtacccactgtgtggcaaaggcaccgagctacagccacagaaaggcttgggtacagtgaatttctactgcatgcctactgtgcaccaggttcagacattacaacctggaggatttagcccagagcacagacatctacaaaaagggggctggaagaatagtcaagaggaaggcatccttttccttgaggctcttctctttgtccagtactggacaaagggtagaatgacatgggaaacttctccctccccctcatgaacccttcacctgaagtcttctgagagccccgtgggcaaggggccccctgctgcagtctcccactcaaaagtgagtgatgctcttcattgagctgaggcagggccgctggctgctgagttatatttatacaacttgtaaatcatcctgtcaggtcctcctgagaaacccaggcaccaatgtgcaggaggtagcagcctctgttggcttcttcaattcctttgggacagttgcgctccttgacactccccaagttttttggctgcttaaggtgacccaccaaggatacacaagcaaagacagaagggatgggagagggaaaggggttcccttctttgcactgggctttgttgctctctccaagatctcttctagggggtgtttggggattaaagggacttctgtctaccaccctgcctacttctgttctcttctctgtctagactgattaaggagcagaatgtcccagaggcaagagaagggactcagtaaccaccaatggtaaggtggaccctgtagcctttggggctccagcaaccttgaccttgacagttggtgcttttagcaaagcccagtaggatggtagaaggaggactggattgggagtcaggaaacctgggttttagtcttgatttttgtcataagtacactgtttgaatttgggcatgtctgagcctcagtttccttgtgtgtgaaatgaagcccctgtgtaagaatgtttaaggagagaatccttccttagggtggaggcatgatacagtgaagagctcagacctgcattcaaagcttggtccttgcgttttccagctgtgtaaccttgggcagtttgcttcacctcattgagactcagtttcttcatcaataaaatgggaagatacttccttccatgtgatcttgtgagaatggaatgcacagcaaagctcagtttctgatacaaggcttagcacctagtaagtgtgcaaaagtgctcatctctccccttccgccaaatccagtttccagacatgctttctgcaactgattctgaaagagtaaccaggcttcagtgctcatctgagtttgatggtggacagaaccaggcaaggagccaggtccagcccttttttccctctctctccctttggcctctgctggggcccttttgaaagcaggcaaaacacaaatacatattgaaagaaattaaatgggtttggccactgggcctttaggtgaataaataaaacagtaaaaggagaaagattactcttaggttgggcacctgccacatcccctcggggctgagccacatgactgaggccagtttatgagagaaatctcagtggaactttggggccaggccagcttgggtttgcatcttgattctccctttgggcatctttctgatgctgaatggggccactctaagtctcaatttcttcatctgtaaaatgaggagatccatacccatctcacaatggtcaggactagaaagaaagccaccatgaactcattgtggacagtaggtgctcagtacaggctagtattccaccctgtcccagaatcatagaacaaatcaaggtcattcattttaactgcagaggataaagaagaggtctgaaaaaggccactgggtttggcctccataaagttcctgttggaaggaagtccccctacaaatgcctttcctccattctttgcctccccagaacctcttgcattctagtcttcactcttttctcttcatggggactttcctcctgacattttatataaagaagagagagagaaaagtgtgagggatgaggctcaaggaggaagggtgtgtgagtgtgtgtgtacacacataggatgaggaatggtacacacgtgtataggctgcagagaaggagccagtgggtggagagaacttggaggtgcactgatgtgaaagtcaatgaagagatgaggccacagcatgtgtaggcaatggcgggcttgggaacccaagtgaagggctcaccatggaaagaagcatgagttcttgggcagtaggggcacaacggtgttctggagttgtgtgtgtggtgacagacaaacctgggttaaaactccagctctgtaacttgctagatgtgtggcatttgtcatgtcccttcatctctccaagcctcagctttctctcttcttgaatgggtataaaaacatccccctcatcgtttggagaggcagtagatttaagtcaagactagcacagtgcttggcacttggaatattcttaacaaatgttggctccctttcctcctcatggctggagaagcacgcagaggatgagcgaagatgtggagaggggcaaacaggagggacactgaggatggtccgaggagagtgaaagcccaatgtctgtcgagggaaggggcaggtggctggtccaggggccaaggccagccaagaagcaagaggcccagaaatggtggcaggagagctttgtcttatctttgtgctgcagggtgggggagccccaaaattggagcttagcccgggagggttcttggcttcaccaggaaataattcagaggtaagccgatggtgttagacagcgacttctattgaagcggcagtgcgcagcagccgctgagggaatgctccttgcagagcagggctaccccacaggtagtgcacccatagtcatagtgcagaggccgttttgcactcctatttatacccactttcaattacatgcaaattaaggtgtgaattatgtggccatttctagaaaaagggtggtgacttccgggtcatcaggtcattgccatggaagggggcagtaacttctgagtgttggcatggcaatggtaaactgacatggtgcactggtgggcatgtcttatggaaagttccttcatgtcttatggaaagttccttccatccagtccctgttttagctattcctcagtttggtccagcgtccgagccctgcctctggagtccagtcccacctcctacctcatttggaacttctgcacagttgccataggaatccatcctggtcttggctagtggggccttttccacgtggaggtgttgggggccacctacctgaggggaggtatgcagagtgagggagcagcagatggagcctaggtgaagagatggggggacatcgctttgcctcgagaccagaagtgactggagacattctaatcagtcctatctcttgtattttgattcaaatggagcctaggactgctggagcacccagctggggaccccaggccaacccagctctctgttcctcctcccacttcagccaggccaagcatctctggctgcacctgcttcaggaagatgcttgcagcaactaaatgagaggacgcatgggaagcccttagcaccgtggctggcctataaaatgttttccagaagtgtcatgcaagaagggagaagaggagacagagaagaaaagccagtcaggggtcttaggtaggaggtgggacttgacttcagaggcagggttcggatgctggaccaaactgaggactagctaaaacagggactggatggaaggaactttccataagacatgcccaccagtgcaccatgtcagtttaccattgccatgccaacactcagaagtcactgcccccttccgtggcaatgacctgatgacctggaagtcaccaccctttttctagaaatggccacataattcacaccttaatttgcatgtaattaaaagtgggtataaataggagtgcacaactgcctctgagctatgactctcggtgcactgcctgtggggtagccctgcctgtgaggtcttaggtcttggccctctgggccagaacagaaggacctggtacctctcagaactcactctcaccatcagcgtccagaatgtctccctgccttaaccttgaagatgccagaggaagtggagggacttgggtctgtcctaggcagggtttcccctgaagccccccgacccctcagacaaggatttgagtacaaatcatgtattttggaggtgacgtcgggaagtattgtcaggggagtgtggatgtgaaccagcaaagggaagaaagccagtgaagttgtagcactgggcaggtggggctcagcttcaccagtgagctctgggaagtggagtagaatggagttgctaaatctccaatgtgtgtaagaatcacctgaagaggcttctgaaaccttccagagccccacctccagagagtctgattcagcaggtctggggcgggactcaagaatttgcatacagcaaactcccaggtgctactgatgctgccaaatcgggaccgtactttgaatagcagtgtagactacacctctgggttaatccccagcccacaaagggatggggaagctggagtatttatccacccactccgcatctgtccttgttgagggctgcttctgggggcatgaactctggaggttctggcgaccggataaagaacctgaggcagagagtgcagtggatggcagcaagtggacacgtgaggacggatgggatgaacactgtggcatctgctgcaagctcagagggtccggctttgaatcctggccctgtcttctataatttgtgggatttaggtaaagtctataatctccccaagcctcagtttcctcattgaaaaaatggggataataattccaacatcggtgtcattatggagatgtaatgagattaatctggtgcgagtgtctggcacatagtagatgcaccgtaaatgtttattgcatctgtagcagcgctgttccagaagcgggatgagagaggtctggttcctggagagagctggaggctgcaggctggcacaagccctgcatgaatccatgtctgcttggatcctcgttgccttaataagtaaataatcaattgagagagattcttcctgggtgctaagaaccaagtcctttccatctgcagccatccagaggcaagctttactagagacctggcctcaaggggctgcctgcgacctggcatgttttccaaggggctggtgaggcaagtctgcatttccaggggtggttggcaactgcaactgcacactgaatgccgtgggaatggaatgcattggccgcttccccttccccaccccggggtagctcccagcccattcttttccctccctcccttgagtatgtgggggatggcataaaaggaagcattctggacatccgcaggatggggcaattggcacctgcaagacaaaatcaagaatttcaggtggtgggaggtcgtgcagaaaagaggagaggtcaatggtggaaaatacggagggccacttggggaaataaaagaacaacaactcagagggttaaccatatcacactgagtttttctagtttataatagcactggggatttggatgtaggatgctactcagagccagtttcgggaaggactcttactgcctgggagccatttggctttctcaacctacttgcatcactgcttgtgaaacaacaatgaggtgagcctgagcaaagggaagaaagagtgtgggggtcctccagccccacccccacctctactaggcacctgctcagcaccattgcagtgtaacgggtccagttttgaaccaggcgaatgcacatctgagtttcaggttcatttttgcctctcactcgctgtaggatcttgggactccggtttttatttgcgatgtgaatctattcagttatctctggggtcctttttgctgacagcttctggatcttaattttggggaggtctctcagaaccaaacacttctccagccaagcaggtttagggagaacccagagcaaccttctctggcagcatcacccagagcggttgcgaaaagtgcggattcccagtcccactggggccctgcagagtcagacactcttcctgtaaaacccaggaattttcttcttccactgcatgctcatcccccctgactctcacacgtattgcattttgagaagtcctgtctaaaaaacaagaaaattttctcgtcttctttctcttctgtagtcagttaaacaaagccacccagctgggccaggtcacctgatgctggtgcatttaatatctaagtggaagcaacaactcatcaaaaggaacagtttacaattgcctgggataaaactattttcttttcaatcttccctggaaagtgacagataataaccagcctggagactgtaatattattagggccaaaaataaaataaaaccccttaactgcttcctcttacagagagaagccaaatagttcttcaactcatttaaataaagtgattgttttccttgctcattatcttaaattcccaggagtctgcagtcccctccttctgtatgaggggatggccctatttccccctctctcatcatttcttatttcacaagaatcccgttaagaccggcagcaagaagccatgcatttatgaaccacttttagcatgcttgctttctgcccggcccccaacccttaaattaaatgagataatatatctgaggcatatagaacaactcctggcatagagtaagtgcccaactcatgtttattgtcattattaatgacatttgaataccatgattctggtctcaacaagatagtctgtgccttcagacaagtcattgcacactgagccttagtttttccagcagtgaaatgggggagagaacacatggacggagggagcccagagcagggattattatgctagaatctcattacaggagggcatgaggacagatagcccctaggcaaaggggttagagttcttaaggccttgttatttccttaacatacctacagaacatacaggagctatgtctgcccccagaccggttggtgcaaatgtagctgaaggaatcattgaatttgacctaaacctctgttcttctaggaactttgttccagatgattctctgaggacaatttacctcctctatgctctgtctcctcttatcagttgtggtgacttagatggctcccgttaccttgacaaccctacccttccccttctctaccaaatgaagaagacagggcctgctttgcagggccatggtgaatattcaagccagcttaggctcagggccaccacaccgtgccatcccacaaatagcagctattacagtggtcgtgagcatgatgtcacaatcccggctcttttcacaagcctgcaaccccttccctgcaaaccagaaatccaaaaagctctgataaatgaaagatttattttattttgttctattttttgtaattcattggatgagaaaactgaacctgacctgaactgacttgaaatgacttggtggcaaaacccagcctgggtcgatgggaggatatttatggtatttgtttttctcacttagtatcaccatccaaatgcgtcactgcagaaatattaatgttgagtgattacacagtgattctttggaccccagttgtgttgtgtgatatattgaacaagccccatatcacctttcagaagtagggttcagcctgagctctgggacacatctggctccaagggttcgggatggtggttgtggaactagtgttaatgtcaggcaaaaattctcacctctgggtgtcctctgggtgttcctcctgcaagcttccattctgggaaaattgttgttcatgcagcggcctcctcacttgcccctgtacataaatccagctcaaacccacccacttgggtacacctgcatccttggggagcccctttcttggagtgcttagtctccatcctatcacgctgcccacctgcccctacaccagtccggtttccaggccaactcctgtgcccatcaggccactggaagggacagcgtcctccctgcctgacctccacatgcttgccttcccccatgtggcactgctggctgaattctctgctcttcactccgatttttggcaccagagccacacaaccgggatctcaaaacagaaagaatgcatttcctaggcaagcccgctccttccttaagctcgcaggctgaggagcgggcaaggtgcagccaatgggctctgtcccagcgcctgggccttccactggcattttctccagcaggttttcctcctgagccatagagattaagagcttggaggtgcccactgagggagaggcttttagggatttaatgcagccttgatgaagcccggagacaggggcaaggggttctttgctatcagaacgtgcagatgaggtgggaatgccccagaaatttaccctgcaggctctggaatagcaatattattatgaataatattgattgatcactttccatgtgtcaggctctgcattgagtaccttacatgaactatctcatttaatcttcacaagaccctaggaggtggctaccattattattctcattttatagaaaaggagagagggtcagagaggctaggtaacttgttccaggccacacagccagtatatggtagagccaggagctgatcacaggcagttggattcaagagcccaaattcttgaccatatgtgtatctgtgatctattaccatgaacatgctgtgtaacacttggacacagagcctcagtggtgtacaacaataggcacttttttctcacacattcaggtggatgagctaggtagctgtgcacactcatatgtctgagagcatctgacctttgactgacccaggctgtcctcactgggacaacaggagtgaccaactctgtcccatgtgtctcccatcctccagtgggctggcccagcatgtactcatggcagtggcccaagaacttatgtggaaacttgctaggcctccagaggccatgcactgtcactcatgcattgtcacctccctgttggccagagcatatcacatggccagcccaggtccaaggagcagagaaatagatgctgcctttttagtgagaaacgctgagtgtggacccaagaagtcgtgaaaatgggaacccttttgcaattcactacgtgacacaggggccttcacagccacagtgtgcacctatgtcctgcagggagacaagagggaccacctgagagtctcatgaccctggattccacctctgtgagctcccaatcaaactgaaagggagacccagcaaatggggtcaatgaaagctctctgctttcaggaacttccaggactaataagggagacaatatttgacctccaggagaggccagcatgatggaggagactcagtctctgcccttggagagcccatggcccctggctgtggagagctgtatgtatgtaactcaggctcagagagctcccagtaggacagggtaagcattgacctcactctaatgggaatgggttgtctaataggtgaggcaggacactgatataagcagaaaataaatgtcattgtacactgaggaccagctgatttggggagatacgggaagaacttattcaggagagtcaatttgtgtgggcgttttggaggtggtgaggttcagctacagttaaggaagcagaagcagctctcagctggacaaggattagaaggtgagcatcagggtgctcaggaaaacaggatgtggggagctcattttccagttccttggcctttgatggagactcttctctaccctgccctggcctcccacttgggcccaccctctggtaacatcctagatttcctctgcctccctcactccacagcagccactatggaaaaagacatttctaggctcagagggagagtggaaagaggtttggagaaaggcctcaggccactttgagaagcttggaaaaaggggagcatggaggaagcgggagaagagggtagctctgcggctggacctgggactttcccagacactgagctctcagatcacgggccctaggtggaggctgctttccttggaccatgcctgggtccaccgtcagagttggaggagctcattctgcagcctgtgtcttctagaacaggcctctaggagagaaggaactgcagcctgcaggccaactctgggccaccacctctttcataaataagattctgtttgaacacagccatgctcattcactcatgtattgtctgcaataacagactgagtagttgtgacccagaacatttggcccataaagcttaaaatagttactgtctagctctttacagaaaatgtttgccaatccttgctctatctagaacgagaacaccactaggacagggatcttcgtctgttttatttgctgctgtgtccccagtgcccagaactgtgcctggcacataacaggtgcttaatcaatgcatgcagaatgcaggaatgaacgacttggcctctctacaaatcatgttttcaaccacacggagcaatattacccaacccctttgttttaatctacttcgactgatcattttacagatgggaaaacagaactttgggaagtccaagtgagcagcattagtcctccagccagttagtagcagagccagctctgggacacaggactactgacccacagggcagggctctttctgctggacatgctgaaatgctcctcaacagcttcttaccacaaggtagcctgcaccatcagctaggagattttctcctttggcatttggcaaaagattcccagctgctgtaagtgcttttgggctgtggctgggggtgtcagggactcctgggtcccaagaagtgaagctgaagccgagatgggtcccaaagacaggtcaccaagcttacatgtgatatgtctggaaagacacccaaccccaactcaggtgcgcggtgaaacctgcagctgtggtttgcctcatctctcctccggccctaaggtggtcaccaatgtgccttgggagtgggggaagttatttgtcagaacttgcaaaacaaaaggcaatttattcctctgcagatccagaaacagatagaagggcgggaggaatcatgcatgtagttggtctccctcctgaaggtctccagggttggagaaagggctgagagctgtcccacaggcttatccggatggaaggcagtcttatgtcccacatgtgacaccaaaagcaggaatccctcatccctgtccttggcagattctacaagttgaaacacatataggacaggcccacctcactcttgatgatagctcccaggtatgttgtatagtaaatcctgtgcctgtaacaattcagggcaatctctttcctgagctggtcgattgttcttgatgtcctcagctcctcgtccaaacctcttaatccaggagcaaatgagctgtaaacaaccgcatcacatggggcgcaggaggagctgctattgaaggaggaagtgaggctgcagcagctttgcaaacagagggtcactggggattggggtggctgcagactctgatgggatcccatagcatctgcaggtgagggtggctgctgatgccgatgagacttggggtgatccacctggggcaggtcttggacaagtgtgatgccctgaggggccatttgggcatttgcctgagactttagggtgactgtcctttctcagtggatgcagaaggatccagacagccttgatcctgtgtcattggcatggatgcaagtgtttggggaggacttgttggaggaggaggaggaggatcagcatctttgaataaatgatacgtttacaaggaaaagcttactgtgggctcccctcagccaagaagtgagactgaacagaaggtctcttcttggcccagaagttctctaaagtccagagtctgcacctcctgctgcagagctgtgtctgggagctccataagagtcagagctgtgtctccaccatcagtctgatgattcctcaagaccagtaagtatacatgtgcaccggaccagcagctcctagtgggtgggtgctagatacccccagtctgaagcgcatctccctcatccctccagcagcaaggtgagccctttcttgctctccaatggtgatctcggacctttctttccccgcagggccccttgagaaagagcagagtcttccaggaaggcaagggcagccactgagttaggaactggaatttactgtgtgaccttaggcaagtccttttccctctctgggcctcagtgtccctcaaacaaaaacccagagacttttccagtatgttagaagcatccttccggttctctcagctcctgccatgtgccttctggaggtaaccttctaaggactctgcaccaaccaccgcccttcaccctcatgctatctccctttctcaaggaccccgggccccaaggcagagccaggtggcatctttgcacttacactggctgactctacactagctgttttgctccccattctgccttcacagcatttcttgtggttgaactaccagtcttgcagggaagcaaaatgaagagaccccaaccctgcctgccatccactcactctccaaagtgcagggaaacagctcctttgaagacctcaatttaaacaagggagagaacagttctgagattttcttcccactctcttggctccatcccttataatggtttcgttcccaagccccagatattctggggagggtgaatgggcagaggatgggggtgggcctggatgactcatgccctgcaaggttctgccaacactcggcatctggtcctgcttcatgcctctccagggcagcctcgggcaagagggagcccttggtgtcagaatgcagggagagggcactgagcaccaagctggcacctgggtgggaggtgtccaacacatgcagcttccttccctgtgcagagcatctgcagcaggactcttcttggatgctcagagcccaccattaactagagaccagatttctgaccaaggccatggaggcggccatgttggctgcactgaaaacagccgggctccgtgacaatgggcttcctgcccttcgtgcagaccccaccagtggaggggtgttcttcagcctccttcacatcagtgtccatcagagattcaaaaaaaaaaaggaaactacccaaactggtgccatcaaggctgtcactcactctcctccctacgagccagccgcatgtgcgatttgacacactggtagcatttctgcaaattacacatcattctccccactgaagccacacctttgactgctgtaatatttacctgaccgtgcaagtaattttcaggcttcacttagtgggccactgaggcatggaagaaagcagggatggcgttgactttggacagcaggcccaagagaagctgaaatattattagaaggtgtcctaatagctcagacaagcacagagagacagctgctcgcagagctatgggcagaggattggttttcatggttctctatgaagcattgtctcactgctgcttacatgactctgaggatggagagctcaccacccaccgtagacataccattccatctctgagtgcctctgacagtgacaaagtactgtattgacactgatgatatctgtcatcccataacttcaacccattaatgctgcctctgcttcatgggtgatgtagaattaaggtgatcagctcattttgacttgcccagatgtttcccagttttaacacagaaagccccacatcccaggcctccactttaatgagtaactcagtgtggtttgtctaaacctatccagattttaagtctgaaagtcctgcatcctggtaaccctctcaatcacaagcaaacctggcctagttatcaccctatgcagaaaaatctatgtcagcaaatctgaaaatctttcctcctccatctgatagcctacccaaggtacaagtgcggttgctgtgattcctcttgccctccctcccctaggcaccccagggaggcaggaaagatcaaccgggagcatcagtggctggtcctgtctctagaaggagcaacatggtggatgggccagactcagtcttgggctcaaacccacctgtgccacttcttagctgggtggcctcagccaaagccccagcccctcagggctgtggaaggtgtcaaggagattttgggtaggaagccccaagaccatgggtgagtagctggcatggaggatggcaccttgagaggctagggatggagtgtggctcgtgatggaccaacagggtgtcattgagaggcagggcagcatggcaatggtcatagcctgagttccaagtccactgtattagtccattttcatgctgccgataaagacatacccaagactgggtaatttataaagaaaaagaggtttaatggactcacagtttcacgtggccagggaagcctcataatcatggcctcacaatcatggcagaaggtgaaaggcaagtcttccatggcagcagacaagagagaaatgagaaccaagtgaaagggttttccccttataaaaccatcatctctcgtgagacttattcactaacactagaacagtataggggaaaccgcccccatgattcaattacctctcaccaggtccctcccacaacacgtgagaagtatgagagctacaattcaagatgagattgggggtggggtgggggggacacagcgaacccatatcaccctctctgccacttcctggctacatgatcttgggccagtcgcttcacccctccaggcttcagtttcctcatctgcgtggaataagagccctgcttcctaaggtagttgggaggatccagtgagcaagtgcacacagggcacttagcacctggccttagatgagttctgaggaaatggtcgcacttccactgttgtcatcgctgctctccacatcattatgttcatgctgaagatccatcacccatgtgaccgcgacagccccttcttccattttccagctttggaatgagtggtttggaagaagctggatctcttaataggttgagtgtgtcccctcggctcttgccagggacctggctgccctggggcagtggagagggggcctctcaagcctctcacagtcttgcccactggacaaaagaggcattttaattcaaagatgcacttaactttaaagatccctcccccagaattttccccatttggcctttgacatgcattcaaacccctcagatgacagagatatgtgggaggagacaataaaaccacaaaaggaatggacaagaggcccagcctctgtccactttatgctcaggtgggagctggtgtctttccccgttactggccaggtctccttgcccccactgggccctccaatcccttctccactagcagccagacggatctttttttttttttttttttttttttagatggagtccccctctgttgcccaggctggagtgcagtggcatgctctcacctcactgaaacctccacctcctaggttcaagcagttctcatgcctcagacagtagctgggattacaggcacatgtcaccatgcctggctaatttttgtatttttagtagagacggggtttcaccatattggccaggctggtcttgaactcctgacctcaagtgatccacccacctcggcctcccaaagtactgggattacaggcatgagccaccattcctttcctttcctttcctttcctttcctttcctttcctttcctttcctttcctttcctttcctttcctttcctttcctttcttttcctttcctttcctttctttctttctcactttctttctttctctctctttctttctttctttctttctttctttctttctttctttctttctttctttctttcgtctttctttactttttttttttaaccactctgcccataaagtccttgctctctggggacaacaaaacaaaacacaaccagatctataatgaaaagcaaatgggtttttttgttgttgctgtaataacaccaagggtttgttcaaagccaggtaaagatttttttttttaatatactgggtgattttttattgaacagtttccttataatagaaaccaacactagactcttgaacttcctctctcccaaaggaaataaaccaggcctcctgcagacgaggtgggagggaaaacatgagcacagctctcactgggacctgagataggagctgcccgtgctacctctcaggctctattaggaccccagtgcctaagtctaactcctgggtgtggctgaaatgcacctggcctgggagtttgaatcccagcttcgccactagtctgctgctctatgtgttgggggaaatcactcggcctctctggtaaagacacctaccaagtcaaagatgagtcaggggctcacatggtccagttagaagaaaagaattgtaagtgtgtggcagagcatttgggtattggctaacttgtttctttaccccattattatactaggactggagatacacggtgttgggcaaaatggttccagcccctacccttctgcaatttatagccaggtactatcaggtatctatggcaaaggcctatgaaggctataaccacaccttcttgctcaacactccagaccttgtgccttatcacaaagctagcctcttagcctgggctcaagaagtaagtatgtacaggttctggtcaggttggccagaagaggagaaactgaactcttcctggagagattaggaaaagctattgacctgagtcgcaaagaatgagccagaatcagacaggtagatgaggaaaagaggggcttataagctagaccaggggttgcctaactctggcccattggccaaatctggccatctgtttttgtaaataaagttttattggaatacagtcatgttcattcatttctggattgtccagggctgttttgtgctataagagcagagttgattaattgtgacagacgctgtgtagcctgcaaatcctaaaatattcttacagagaaagtttgctgtccactgatctaaacaaaggagtcaggccaaggaaaggcccagaaatctctttcttgcttagaactagaattggccacctaatgactgggcatggtggctcgcacttgtaatcccagcactttggtaggccaaggtgggcggatcacttgaggtcaggagttcaagacctgcctggccaacacggtgaaaccccatctctactaaaaatatgaaaattagctggatgtggtggcatgcacctggaatcccagctactagggaaggctgaggcaagagaatcgcttgagcctgggagacagaggttgtagtaagccgaaatcgcgccactgcactccagcctgggtgatagagtaagactctgaaaaaacaaaaacaaacaaacaaaaaagaagtggctacctaaattgtgtggcccaatgcagaatgaaaacaggggcctcttcttaaaaaccgattacaaatttcaaatttcagaagcagagtcttaaaccaactgcagagcccttgtaggcacaggtctttgtgcagctcttgcaggctctgggcagagttagaagttgcgctcatgctcttccctgggaaaccacactgggagtagatctgggaggcagtcttgacccagggatctaagctggggcttggcgtctccaatccccaagccaaacctccagaaagaccagcctcggatctactccccaagccaaggggatggagaactgaccttcccgtctcagcaatcccgtcccattcttggagcctggctgtgatgagaagcagaggtgggcccagctgcctctcccaccgggagtgtcttggtgatcagacatgcagcagccataagaagacacatggcagtttaatgggaccctctctctgacgatgctgttctccccatgctcacctggaactatctgatgggggagcagtggggaaaggaacctcacctcacccaactatggaacagcaaaatgagaacaagggctcatggaaaccttccatgctaggtgtccgctcaaccccaaccccttagattcctggactaaagtctgtgtcatctgcccttccattgcacagacacctgcaggagacaggaagccagatggaaatgcggccaaagtctttattccccagctcctcccagtggggcccctgggtccctccacccaagcttttgggtggaattcttcttcagctgctgctctcttggattcagggagacctcccactcctttgcccccttcccttttctcctaagaggactacagtccccaccggtctctgccccagtgttgcctcatgccttattggaatttctccgccgtgcccatatctttgtaaatcaccttggaattaaggtcttcttatttatgatcttttcaaggaatatctgtttcctgctgtgccctgcctggcacaaccatcttcccccaacccaaatggcttcagtcaaatagagccttgtaacagatggaagttgcatccacacttcctcttgcaaaggtgggtgctgaacagggctcctccttggcaagaagttgaccactgttctggctgagcaattctaatgcttcccctggtgtctgctgggatcactgggtagtattcagtgggcggctgatctggtctgcaggggtcaaggcagctttacccacctgcaggcatggctagaaggctggctcagcaaggtccccctccttctccaggtggcctctctagcaccacaatgggatgtcttaagcagcagctcaggatgtacttgttcccagagccctgaatgaaagcttccagcccctaaggcttgggcttggagattggcacacgtctgccacgtccgccaattctattggtcaaagcagtctccaaacatgtctagtttcaaagggagagatcgtagaccccccgacccccgccatctctaatgcaggaatctcaaagaatatgtgccatctttcatctaccacacattccttcctctcattatcatcaccttcttcatttgctgagagctggggtcacaagccattgtctggggccaaatttgtcctgcagattgtgttaatttgatctacactggggtttctgtttttaattagatgacttggacctgcatagactccctgtctcaacactggtcccacccttcccgctgcctgccaggggctctctccttggctcctggggccatcgtttggtggtcctggactaacaggtgcatgggaccagtcagatgggccacacacaaggacactcatacatacaaattatcagaacttttatataactcatctctcccagcccaatttctggaaataaatgctggttcaacaaatgtgtagaccttttctgaagtctccaagatggtgttggggaaagagacaggactgagagacccaggggcctgtgttcttgtcaccgtactgcctggtggccttgaatagatcgcctggcctccctgggctgttgcttctgcattgtgcagaacaaagaaaagatgtcacccctgcatcgtgcaggacaaaggctggggtcaccccaagtttgaggcccagctcctgcctcttgtctcaggccgatcactccatcactctggcctcggttgcctcctttgaagattggggccataacgtgaatcccgtggggtggttgcaaggatgaaatacagtgccaggcacggagcacttggtcctgacaggccctcctgtacactctgatgctctgtgcctgcgtggggccttcagaggccaaactcccccgccctagctgagactcactcacctctgtgtctagcacaggggctgacacatagtaggtgctcagggaacccttgttggattggactgaccctttgtcaaacaaagcagtagcaagagaaatgaaaacgtgactttttttaaaaaaaagaaaacttgtgcaagaatgttcttagcagcttgaagcatagcagagcccaactggaaactgtccaggtgccttttaacaaaagaacagcttaacaaacatagcgtctccttgacatggaatactactcagtgattaaaaggaataaaccatggtacacacacagcaggggtggatctaaaaaatattatgctgggagaaaagagccttccctggaatctacgtaccgtataattcgttgatacgaaattctagaacaggataaaatgtgacaaacagattagaataacgatcatctctcgggtgaggtttggctgggaaggagcggagggaattttctggagtaatggtagtgttctgcatcctgagaagggctcagcttacactggtgcacgcatttgccaaaactcaaaaagaaccctgagtggtactcttgagatttgtgcaattcattgtgtgtaaatttgacctcaaaagaaaaggaattgtaaataaatattgaactctaaatagaaggtttaggagtaaactgtacaggtgtctgcagctcactttggaaggcatcgaataaataaggctgtgtggctgcatcgagagggatgaatggagggtggggggagatatgataaagcaaacatggctgcattcatttatttatttatttatttatttatttatttatttatttattttattttgagacagagtctcactctgttgcccaggctggagggcagtggcgcgatctcagctcactgcaacctctgactcccaggttcaagcaattctcatgcctcagcctcctgagtagctgggattacaggcgcccccccaacacacctggctaatgtttgtatttttagtagagatggggtttcaccatgttaaccaggctggtctcgaactcctaaccttaagtgatctgcctgcctcggcctcccaaagtgctgggattacaggtgtaaggttttttttgtttgtttgtttgtttgtttgtttgtttgtttgttttgagacagggtcttgtcctgtcacccaggctggagtacagtggcgagatcttggcttattacagcctcaacttcctgggctcaggaaatccttccactgcagcctcctgagtagctgggactacaggcacataccaccatgcctggctaattttctgatattttttgtagagatggggtttcaccatgttgcccaggctgatctcaaactccttcgctcaagcaatctgcctgcctcggcctccaaaagtgctgggattacaggcacgagccactgcacccagcccatgttcacattttaattgtggaagccaggtaatgggtatatgggtgtttgccttaaagatttttacactttcctgcatgttgggaaatgttcgtaatcaaatgttgggggaagaaaacatgaagctatagaactaagctagggcttgtctctgagcctcatctgtcaaatgcagacagcactacccagacgggcaaccctgggatcaaacgagaagcagtgaataaagaggagcccatggggacgtggcaggaagcaacttgattcttctaagcaagcggggccccacctcctcatttggatctcagcttacatgtgaccttctgaggctgccctcccctggccacccatctcttgtagccatcaccctatgttaatgtctgcatggcaattctctctagctgatacatctcttccatcttccttaatttaaggtatatggctcctgacagtagaatgtggattctaggagaagagggacattgtctaattcatggcaatatctctggcacatagtggggacacagtaactctttgtggaatgaaggaagcaatgagtagggcctgcatatgctctatcgtaacccctcaagtgtagaattctgccacccagaatttgcctagtgttaacgccacccccatagaacagcaggaagagaacttagcaatcagccatcccctgggccccatttaacagatgggggagccaaggcccagagagggaatgcaaatttcccagcatccgctaccagtgagtggctgagcagagatggggcccaggtcttctagctcccagctcagtgttcttcctctccaactggctgctggagctcgtggtaaagtgctgattcccaggaacagccggcagatggacagacaggcttcactgggctgggctgccctgatgccatgtgttaattacagcagacaggatatgccagcctagcaatgtttgccggtgcacccgcccctcgtttagcaggtgggcaggctggcgcaggccactgatctgccacgggtctgccggcggccgatcatgctgacacaggcccaattgtgcacagcgcctgctaagtggggtgggccaggcagattggcacagcaagggccctctccgaggactggcagccccttctgactgcattggtcagccagactggtacaagctgggcatctgtcccatgatgagcccttgctggacacaacctgtctacacaggtgtgcccactgaccggcagcccggggggtgacacggggactgagtgctgagcatgaccatggggagaccttgtagggggtgtcacaggcaggggatgtgggccagaacctcacacacaggtacacagatactgggatcagataggactctgccatgctcccgccccccacacctgccctgttgactggtgggatccaaaaatcaagtttgcagccctgaaagaggggctggaaaagtggtctcttctctccaacccaatgcctcttcccaattgccactagttctactgttcacactgcagccagggggatttctctgataccaatggagctgatcactctcctgtttgaagccttcaatggctctccatttccctccaataaaataatagtaataataatatgcattattagcattttacagctaacagcactcagttatagcatgtgtactatgtgaaagacaccttctaagcactttatagggaagaacccgattcatcctccaccctagatggtggtgctattgctatcctcattttacaggtaaggagactgagacagggagataggagatctcaaattgacttgaacctagaggtctgactccagagcctaaccactaccaaacccagactccacatgtgtgagccatgaccctcccacaccaggcccttctacacagcacccccagaacttgtcctgaacccccctcactctctacccaagccttgccttcttgttgatgcctggggacccccatgatctcctcctgtctgccccgaaggctctgcttcaacctccaaagcagggctcagggtccccttctgggcagggcctgccctggaccctccctggcagagctccccggcctgcacgccagtgccatttccactccatgtcagcagcctgctgctgagcgagcacctgctgctaatgtttctctcctgaccccaacctccacctcacccattctgtgaactccctgatgacccctctgtccacaggcctggcctgcaggaggtgtttatgaatgaagaaatgaacgaatgaatgaatgaatgaatgaacaggcaagtgaatgaatgaatgaacaggtgagtgaatgaatgaatgaatgaacaggtgagtgaaagaatgggaagctgaggtcactggggttacaggaatgcacaccgagggtgtgtagtgaagagtggctttctgccgggcatggtggctcatgcctgtaatcccaacactttgggaggcgaggtgggtgcatcaccctgaggtcaggagttcgagaccagcctggccaacatagtgaaaccctgaggtctctactaaaaaaaatataaaaactagccagtcgtggtggtgggcacctgtaatcccagctactctggaggttgaggcaggagaattgcttgaactcaggagacggaggttgcagtgagctgacatggtgccgctgcactccagcctcagcaacagagtgagactctgtctcaaaaaaaaaaaaaaaaagagtggctgtcatggagacacaggtggctgaataagtccctcctccttcctcctcagcccactccttccagaacacaagaggggagggcatttgttaaactgggaaagagcccccgagcccctctctttaggggcaagccatgtgaccctgaaccctgtctctaatgctgggattttccaagagcatacttgtcgggaggcagggaggaggcagcgaggagctggacatgatcacctggtctggaggagggacctgagtatctcaggtgctgcagctgttcagccctcggtgaacctgtgcttttagggtctggattccaagcatctggatttgggggtgtggtggaaagagggtgtgcttcggagcaaagagcctggctcccagctctgcggactcctccctctgtgaccctgggcatgcccctcccctctttgggccttggctttgccttgtgtaaaatgagagccctaaatgggacagtcaagggcgctcctgctctgaatgacctcctagggcaccaagggtccagcagttgatggccccctgggaaagctgcaaagagaccctggtgaggagtgggcctgggggttccggactgtgtatccggttgtggttcctgacccctgtgtccaaatgacctgatgacgcttgttaaaaatgcagaataaggactgcattcagaagtcactgagttggaacctccaggatgggcttccggggaaactgacattttcaaaccccacccccactctggcccaggtgattccactgtgcactgaagttcgaatgtctggcatctatctgaggccctttctatttcccctgcttcctgtctgctagcccctaaagcatgaagcgggagcggggtgctgcatgggaggtggagaaggaggtctcagagctcccatgcatgtgtctgatagagtttggggggctcaggtgtttgggtcgtgactgtgggctttgtattcgactggtgggtgcctatctgggcatgggaaatggcaagggagatacaaccttacatttgccaaaaactcatccccttacatacacacacacacacacacacacacacacacacacacaaacacacaccctttcccggagtgaggagcagggtatataattgcacttacagctgtgggtgcaggcattgtgcatgcacaacaccgtaagtccacaaactgacacgcagccctgaaaatgcctgcatacactctcttacactccctgtgagacctcctggtcttccctgtgctaacatctaaaactacgcatgaacattctcattattactttgcctttcacacacatgtacagcctcgtaggcagcctggaaacacacctatttgtacagtcatccctacggatgcacagatgcacacccatactccgttgaacacaggcttccttgttcacagcaggctcacccacgcaggatggggtcccagctcacaccagtggcacacacctcctcacacttgcaggagcacctgcccacatgtggagtgtgggtcctacaaagaagctgcagccgctctcctccctgccactctccccccagcccccaggcccatctctgagctgctgtctgccatcgcacggtaaccggatgagacaggcaatttatgacaccagctgtctctgtcaaaaccggatctcccacacacaccaggggaagccaattaccttgagcccagccctgccagaaaccggggcccacaagggagagcagggactgcccagagaggtgagtggcacctgacatgaggattttctgcctcttcttgtctttgggcatctggtatcctcttcccccaggcccccttggggaggacagagcctgccctaccctctctgaggctgcttctctggcccagctcccaggcctaggaactgcaagagcggtttcagggtggagaacaggtgggcagggaggtttaggggaagagtggtccagggtcgttatggcaacaagaaagggaagaaccctgtgcccctccccctacacagcaggcggccaggcggctgaatcattctcccaggcttcctctccgccttcattcccctcacctcttccctcaacacccctgccctggttttcctctccctagaatacctactccctttcttgcccccctgcccgaaactaaagccaactctactacctgagccacttcctgtctggactttggaatcagacccatgttcaaagctctccatttcaccacctcctaactgggaatcagggcaaatggcatcccttctctggccatgggttttgcatccaaaagaaaaaatgatgttcattcctataaaaaaaaatgttgaaaaggagtcttctaagtaccagactccgttctataatcggggatgcaacattgaacaaaatgaagtcccaccctgggcttcaggctccactgcaggagtcggaaaccacacgtttcagaaatttagaagagatgagtcagttttctcactgtcctcatctgctttgtttacagccatactcccagcaccaagcacagctcctgaaaggacctcaagcaatagacaaactcacaaaggcaccagtggactcaagctctagcctgaggttgacttggtctagtgccatctttgtgcccagccttgcagggcgctttctaggcatactttctgagtgggtgggatggcggcagatctgcttaagtgaacaggaagtccgttccttccttcactgactcattggttcattccacaaatgcacattgagcatgtactacgtgccggttcccatgctaggctcctgggatcaagtgagatgggcaaggactcccacttgatagttgcatggcagaagtttctagatttgctcatcacctcccacagtctagaagctgagcaataaattcacactaacagcagtgtccacttgcctttgcattttgcaagatgcttttacatatgtttgtttcttttagtatttctcacaactctggggtgtgagtttgtttaatatccctcgcgttacagatgaggaaactgaggcttagaaacaatcagtgacttgcctgagaacccagagccagggagtgaagcacccacagtaaaactgagtccctttctagccctcattgtctcttgcattatctaatttaatgcccttttcccctaactaccatgaaaggcaggtatcgccttaggctgtttacagccagggagcacctcttgcctgggctgggattggaagctgtgctgggctgacacaagatcccaggtgccatccactcctctatatctaatcagttcattaaaaccctccttgcaaacactctctcggctgcctggacacagagacctcagctgctccatttccaggagagcaaattccttcctggctggagaggagttgggataatgtagacaggcaatttaaacagccggcaaaatacaccagcagttttcactctctgccactattacactttccagccgtggcgggattggcccataagtgggatatcaagtttattacagctatttccaacctgtaattggttttgtggaaaacaaagagaaggaggttgggaaggtggggggaggtgatattttccccttttcttttttttttttttctttttcggatgacagcacccagggacattggtgaggcagccgaagttggagacttatttgtttttcaaattaaacagccaggccggtcagcgggctctcacactgctggctggactaagtccaccggccacgctttgatgactctacttgaaaagcaacctggcctggctgcagcctagatttgctggttggggtcagggggcagtcagggcccagaggtggggtctggcagctctggagcatgagaaactgtggtctctaggctgactcttctagaatcagaacactgcgggcattcagggcagcaaagagtcctcagtttcctcatggaacatttagggaaactgggtcccagagagaggaacagtgcagagacaacctttgggacttagaacctagctctctgcctctcagaaacttctacacagtgtagctggtcatttgggggaattcctggctgagatgctctcagcatggggaagaaaagagacacctgttcttaagaacccatgttacggtctgctgccatcattgcagtccacccaccctgaccaacctccctacttcggacttaagaaaaatacgcaatagctaatatgatggagcactttctgttacgatgacaggaggtgatgtttgcaagcaatatctggcacagggtaggcgccaatgtatgccagctattgttattcccgtcatgctattattaccgcatgccaagcaatcccctgggctctctgtgtgttcactcttacgcactgaattctcacacgtgtgccttacagggaggcatgatccttcccgttttgcagatgaggaaacaggcacacagaaccctccaacctcacccagcaatcaactgagtggcagagctgggatctgattccagagctgtgtgaccccaaaagcctctgcacatttcccatatccccaacctcaaagtaggtcttctgctcccttcttttggactcatccatgctgagcggtcagctctgctgtttactattacaagtataatacatgtgtgaccttgggcagttcacttgcctctttcttggccgtggttcctgtctgcaaatggggatcatgacacacgtctcttggtatagttcacttattcaacatcccttcgtatgccaggcactgtgctaggctctgggatacagggctcttggagcttacagtcctgagattccaaggaacaatggaagggagggctgggggacactcagcctgtgtaggcactggttaggatgcagattcttttgcataactacgtgcacagcctcttctgtctggtccaggtgtacgctttgcagagttaggatgttttcctgcacagaatatcattaatgctgggagctttaagaaagagaaagcctgctggttccttttggagcctcacatcggaggtggtctgaggccactgtcccgcctgggccaggctactcttaccagggagtcccagacagatcagggtccaggcacagcaggctgtcctggggccagtctgtatcgcagagcagcaagggccttttcccttttcttcatggtattcccagtgcctggcacatggtaaggtctcaactcattcattcactcattgactcatccagcagatatttatcgagcgagtgccatttgctaaattctggaaacagagcaatggacaggacagataaagaccccatcttcggccaggcacagtggctcacgcctgtaatcccagcactttgggaggccgaggcgggcggatcacgaggtcaggagatcgagaccatcccggctaaaacggtgaaaccccgtctctactaaaaatacaaaaaattagccgggcgtagtggcgggcacctgtagtcccagctacttgggaggctgaggcaggagaatggcgtgaacccgggaggcggagcttgcagtgagccgagatcgcgccactgcactccagcctgggcgacagagcgagactccgtctcaaaaaaaaaaaataaaataaataaataaataaaaataaataaaaataaaaataaaaatacaaaaaattagctaggcgtggtggcaggtgcctgtagtctcaactacttgggaggctgaggcaggagaatggtgtgaacctgggaggcggagcttgcagtgagctgagatcgtgccactacactccaggttggtgacagagcgagactctgtctcaaacaaacaaacaaacaaacaaaacaaaaaaaaaatccacccatcctcatagagcttatgttctaggagtagctcatattcaaggacctgtgtgtttgttcatcaaaagtctgttgaatatggagtgaatgaaatcattcatttcagaagtgcctctcgctctggggccaggcaaacccacacatccacagggcttggcttaccttgtctgccttgtcacctctgtggttgtcggtcggccctggcctcgtggtccctacccactggcaccatgggagcctctcagagcccatgagacctgcctgcctccaggtactcactcagggcatccctgcactttgttttgaagctgctacgatgactactagcaaattctcggtccctgctctctgcaccccactccttatagacacaacccagccttctggcaccttccacctgcctccctctctgggtgtgggctcccttctttcatttactgaattccacatcctctggcattttagcaagagatgctttgctctccagccccatagacagaaagagccctggagggtggggagggacacagaaaaacagatggtccagaaaggtgtgagtgctcgtgaaaataccccatgagtgagcacttcccacccaccagggactctacaaggctcatgtaatcctcatagggaggaacgttgccttatccccatttcacagatgaggaaactgagactaggggaggtggaatgacttcttcagagcacaaaattaggaaccgaaatcaaacattcaactggggatggaggaaatcagccttgcttcatgctccaaagcctcccatagacagaaagagccagcctaggaccaagcactccctgaaaagggcctacttcctccaggaagccttccatgatcacccttccctccaaggggattcttggctccttcagaagtgtcagaacatcattggataacacttggtaattacctgttgctgctgcagccatcatcttactgactctggaacctcagctaattgtggactgtgtacctcttgtgaataaggtcgtaatgggctgcaaccatgtctgaaatgtatttccttctcggccgtgaggctgcaactgcccctgtatgtctcaggcgtggagaaatgtttctagaattaaaggcgaggtgtcttccagcacacccaccacaccttctgtccacagcctgtactaataatccccaactcccacctggcctctttcttgggccctctaaccaccaggaaccacagaataacatccttgcaaatagctgctagcccgctggccccacctgagcgtgtctgagcctcccatttcctttgccttccgagaggctgagggaggaaggagtgtgtaccacagacagctgggacagtggggcctgccctccagatccctcaccctgcagctgagataagcacttgtctccagctgcctgaagcaggtttcacagaagcagttatttactcctctggctgacagtgaggccctgacacagccccagagaaacagatgtaaataaaaccaaaggaaaactagtctcgtccttgaaactcccctgtccctcagcctgaaacagagatttacgactcggataattcttcagtgctttatctggggtgtgtgggtatgtgtgtggatgtgtggggtgtgggtgtattttcctcgtaataaaaccctcagtctcggcgaataaatttgaggagacagttttactgacagatttttttctcttttgtgtaataaaaaaaatggagtgaaatttgagattgggacgataagggctgccgcattttaggaggagataaaaaagcagtacctgaagggaggtgaggccagaagacgggctgccagttaaacaggcaggatgccttccgctttatgactttgggagaaaaatcctcacacctccactgagattctgacatcctttctcctaatgagcctggccaccaggggtggaaagggacgttgagaggcattcagttcacccgcagtctcttccagcctgatgggatgggatgtgaactctggtccagaagccagacgcttgtcaggaacctagtgtggggcctcagccgaatcattttgcctctccaagcctcagtttctttacctgcaaaatgggaacattcttgtctattcggctctgttcccagggacctggtacagccacacaatgtgatgggcttaaaactgggtttctccacctgggcactgttgacatttgggggccagataattcttgggaggggggcaaggggctgtcctggacatagtggaatggtcagcagcttcctagcctctatcagctagacactggtacctaccaaaccgcacctctcctccccagttgtgacaaccaaaaatgtctcctgagcttgctgtatgtcccctggtggttagggtgagcaaaatcaccccccaagtgaaaaggccctgctttaaaggtactttggtggctgtaaaaaagtcaaatgggtgaggcggggatgggaagagggtgcatggagaatggggagcccctggagggtcttggcctctaccccaggctgggacattgggatgtggggagatggaagctctgatcccaagtacagccaactctcttctccaccccatgccaagctggacacagtcaactcagggacattcttctgggtgatgacagtggacgcagagtcaaggtgtggttggttggggtgagcatctttcttggggtgagtgccagcagggatcccaagaggagaggagaatcctcctgtccccgtcctcctcatcttcctccactctcatggtcccgtttcagaagctgggcctgtgctgcagaagcagccaggtgggaggaagtggtcctctgtctcccctctgcacatggtcagaaagcgccaagccctcagaggggaagaaagtgacgcgtgtacatgtcgctaagtcccgacagagataggaggggtgtgggcttacggaggggtaaggagaagccgtgccctgggaagtctcactgccgcttcctctcagggtcccagagcctgcgaaggccttctcatgattctaaccatcccccgtcctcacagaggccaccttactctttacaaagcttgcaggctatggaaagtgactggcacagacgtagcctgtgtctgcacacagctggttgctcaaccagtgctggccagatgcacggagtctctcctaaaccagtagcaacaccacctaggtcagagagatgtggtccaagtcagcttgggtacatatgtgtccagaggagcccagctgtgtctagggccagtactcccaggcaggtgacagggggacagattcacactccaatcctcacctttttgcctggggaagctgctttcagcatcccccctaccccagccccttggagtcacccgtccctagccagccccctccctgcccctttccccgctgcctccaccacacagagccgcagggagctaattccacttctctaggcccaggcatgaggcctccccattgcaggctgttagcgcagagcccagctgagctgcgagaggctgcaagctcccagtctataatagagttgctgagacaagcggaaaaactgcagccgagtaaacagataaataattgaaacagtgacaacacataccttgctgcttcgtggagtaacactttcattagctggaggcagcgcagatgtggggaagcaggcgggcggcagctgagggcacggacgcttgggttcgctttccatcagccatgaacagcgggacagcccggcagccttgggcttccagcgctggcttcatcgccacctccctgccttctcccacttccgcattcttaggtgaaatggggacttcatgtcctctctcctggcccatcccaagacgagggcaagtgccccacgctgtccccgtctgcatcgcccgtgccgggatgttggattcctggcctcctcccgggctccctgcctctagtcttgcccctttcgattcatcctcaatctatagccagaggagcttgtaaatctaatctaatcctggccccggggaccaccgccttcaggagaagctgagctcctttgctgtggagaccctccatgatctggcccacatttttcttcgcagcctcttctcatcccacttcctttcttctccaggtgctgtgaaggcagcaagcttcccctgagcgcacactgctctttcctgccgcagggcctttgctgttccctttgcctagaaaactcccacccgttgccaggctggctcctactcttccttcaggaggcaacttaaaacatcgctgcctccaggaagccctcggttattaccttattctcaggatgggggctgtccttcttctgggcttcctgcctgcatcttgtcagtgtcctggggaaaggggtgaccagggccggttgagcactcacgtgtggctatctctgtgctctgtggcaggtgacggatggtggcaccatcaagcaaaagatcttcaccttcgacgccatgttctccaccaactactcacacatggagaactaccgcaagcgagaggacctggtgtaccagtccactgtgaggtgagtgcctgggggtggcgggccgacagcgggggaagggcggagggatggggagtggggcagagggcagttctccagccctttcacatcaatccctcggtgctcttgggcttggaaggcagaactgggggctccccttatggaagtgggacccattccctggagggacatcccctggagggaagaggcaggagagggccaggccaccgctcttctgactggcctcctctgccagctcctccaacagtcctggaaggtgggtattccaaactccatttatttccaagtgagatactgaggcccagagagggggagcaatgggcctaaagtcacacaggcaacaatgacaccgctgggcggtgaagcagttctgcccggcttggaagctcaaacaccacattctactgttttttgtgtgctccaaggccataagggccccgagcttaagagagaatgaccccaagcaactggactcccaggtcagaagcagcagggtgggaaggagcagtgctcaagtcggagatgcttgattttcctaccccatccctgttttccaggaggcgggtggcagaatcaagctgactcgatcttccagagcctgctgttctctatgtgtgtggctctatctccttcccacaaactccctacaagatcctagtcctgttttatccctttgacccttaacacacaccggtccctcttctcaaagggcctttctcccttcggtcatctggtaaactcctcatcagccttcagaaccccactccagcaattccacccatgggagccctcaccttagctgaactgatcccccaaagctggtcggctgcaactgccccagtacccacccctcctcagagggaatctcactgcattcatgaagagtgcacagctttgcacacacacactcttccacgccacaccgccaaatgctttgccaggtgcccagcctgaaagtagtggtctgctccaaagctggagggggaccgtgctgcatcgggtaccgtgagggggactgcagccccggcaagcccacatgatgtgcactgtggcaccatgctatgtggatgtctcagctagtgcctggtactgtgttgtctttagactgagcctggaggagggggaagccgtactctccagcacgggctgtgggtctctgtgaccgtgagctccaggaggacaaggcacatgctcctccttcaccttgcatccccagctctcagcccagggcctggcacacagtgggtacataatgaaatttgcaaaatgagtggacaactcaggctacactcctcagcccttcaggcctgttttctattgggtgaaattagaaagcgggacaagaagattgtaaagggtaagtccaaccctgcatcaagaatctgacccaggcatcctcctctgcctgcttttgtaaaaatgggaaggtgagtgtgctccccaggcggcccggctgggtcctcgtcctctctgggctctgtgccaggaccatgctgagaatgtggacgtgaaggtgtgtgaagaggtgtgtgaacagccgcacaaactccttcatccccctagttatgatttctcctgaacctgcttccaaaaagaaattatggtgccttaaaatattaaagcacacctaaaacaagccagttacaatcaagatgaaaaaggagataaaaattcattttggagaaaatagctattctggaaaccacagatggttttgtagtaagtgaactcccaaataatctccacgactcccagaagcctaatgccacccagcccacccctgccggtcactgtgtctctgagaattctttcctcaccaagccacccgctgccaccagcaaggcctctaggactccttggttctgatttctagctaagaaagaaacccagggaccatctagaacattcctgagcaccaccctctcctgcttcctggagcctcaagggcaagccctgctaccagaagacccagatgaaaatcccagctcagtctctgcctactgtatgacctgggatgagagccttaacctctctctctctctgcttcaggtccttcgcctgtagagcagacttgacatgacaggctttgtacaattgtggaatttcagtgaaatttatgtccaacagcctgagttcaaatcctgcctcttccacatcctggcattagtgaaatctggggctggtaaccccacagttgagtttcctgacctccaaagtaacatgacagcactaagaggctagctgcaagttgtgaggagctgatggcgtgcattcaagtgaagtgctggtttccggcctctaagtggtacatgtttgctgccattgcctagaacaacctctccttctcccaccataaaacaaaacaaaaaaaattcacctttttacaaatctcataaagcctccttttatgcgctttctgttttgatctgcacaaacaaccccatgaatgcaggcaggtattattattattaatcattttctctagccctgttcttactacagaagaggtcaaagttcagcaggcccaacagtctccctctggaatgacatgaacttgaccagaccccttgcttttcagttgtggaagccaaggcccagagagggaatgaggcttgcctgaggtcacacagcggccctgacttaagcctgatatcaggagccagtgctcttttcttccccacatgggggccaatctccctgagcctcagtaacaggggcggtctcccaagcaaagaacaccccagggagctgagccgtcctgtttggtgaccaccaagggagagggaaggaaggagcagaccctctggagcctaacgggatcacggaggattgtcagccctcccaaccagccatgctgggggcgactgcctcttcaggctgcagagccccatcagggctggcgacggggcgcgggactccgcatttacatataaatgaagatatttacaaattaatgcatctcaacgagagagagtcccagctccacagctgtctgagccgtttcctcttcagctggggaaagtagggagagaatgagactgagaagattaccaagaattggctgagagcaatttcgcgggtagcctagaggagccccaaggactcctggagctttttgtcccactgatggggccctggagggatggaagtcgggtggatcatcaggacttctgcccccagggggtgcaggtgtgtatccctggttgtatgaccttggacagatcactgcctctctggatagagcgtcccagaggcacatctatcaaatgcttttctaggtcttagccccagagcccagaactcccaggttggaattgacaagaatgtattccctccaaggctatttagttgagcacctactaggaccttggcttggtggaaggtgcccagggatacagggggaatgagaaaagcacggctttgcaatctagtcggagagacatggcaaaatgtagatgaatacatcattccacattctgcaaagaagtgattctaaaccatgggcgtgtaatgaaggggcaagtggggtgcagtaccgggaaggaatgagatgctgggtgccatttagatgggtggtcaggcagggccatcgaggaaggtggcacttgggtggagaactgagggcaggaaggagccctctgtgaaagggaggaggcagatgtggccgacagttatcccaccctgcccacttcctcttacccctcgctcttcctggcagtgccagcatccttggtgcttccacagggctttctcagggcactggagaccactcagcctgcacatgagaaaggtgagaagtgccggggagttgacgccaccccgggagcagccttgaccaatgactgtttattgggtgcatacccagccccctcgtccctccagggggacagttcagatgcatgctcaggaggacaaagtacaagctcctccttcacctcgtatgcccagctctcagcccagggcctggcacacagtgggtgcataatgaaatgtgcaaaatgagcgggcagttctgggtatgctccttggccccttgggggtgtttcctaataggtaaaattagaaaatgggataagaaggggggacattgagaaactatgggatgaatgctgtcaactctctcccggagtttctcagtgaccccccagaataaccttgagaaggcacccgtattggcttccttcccttctagctcattccatcagcttcctgggaccccttctcacataaaccctttcctcctaaatccttgtttcaaggtctactcttcattccacccttctaggttcttggctgggtccccggtagcaaaagacgaattcacaagacaaaaggatacaagtctagtttgtatacgttttaggtgatgcaggagattttataaggaaatgaagacccacagaagtggttctagctgagtgttttttgctgggttggatgaagggtggggagtcatgggaaagtgtgaaggatagaaggacctgagctaagggcagtaaactggggacactcagcagggtggcttgttcagatcccttggaagtgaagatgctgccttcctccaggtacagagagggaacctctcacgtgaaggtcttgtgacctgcttcagggaaaggtcagagagtccttcctgcgcctgccatttctcaaattccatctgcttaaaatattcaatataccaaggtgccaaatttgaggtggcgtgtcctgaaccccctccccatggaatgtggccattccagagggcagctgtgacctccttggaggtccaagtgaatcacagtgaggcttcaaccactccgcccacacacatgctgtgtcttccatttcctgaagcaccctgaggcccttgtcccattcgatctgctcaggaagcgatgaggaacactggacagatttcactggccttaattcactggtgcagggaatctagattcgaggggctcagtgtattcctgcccccgacctgctattgcagatccctccaacaccttggccaatgctctttgccaacaaggtcctacttgtcctttcaagttcagcttaaaggttgcttcctacaggaagtcagccccaactgctcaagctcaccgactgatgctatgtcttcagagtctgcccgcccccccactagactggaagccccatgaggacagggactaggtctgatgttttcaccaccatcctctccccaacccccaggacagcacccaaccctgggcatgtggtagatgatttgtaaatatctgtggggtgaatgagttcgtggtgaacatggtggtggagtcctttcaatgcaacacttgctgctggggtggatgaacaagacaccttaggaaaggaacatccaggcccccgttccttcccccaacactcacatcattcattcatcacaaaggaattgagtagttaccatatatcagggacaatgatggagataaagtggtgaacaagacataatcagacctgctttcgggaggtttctgatctagtgggtgaggagagacacactacaaaaatgcctttaaaataataaggaaaaacagttacagtgtgtgatgagtgtggtgaagggaataaggtacaactgtccctcaggatccatgagggattggttccaggacacccccaagcagataccacaatcctaggattctcaagtcccacatataaaatggcacagcatctgcacatcacccacgcacatccacctggatcctttaaagcatctctagattacttataatacttactatcatgtaaatgctaggtaaatcattgttatactatatttttatttgtattatttatattgttgcattattattttttttctctgaatatttttggtccacggttggttggatctgcagattctgaacccatggatccggaaggccaactgaaatgtgatagagaggggtgagaataatggagtgagggcattgcacagctcctcataggagatacctggaatgtatctccaggaatctggagacatctgagcacagatctgtagtataagaagccagccaggcaaggttggggcttgggagggcactccaggtagacgacatggcaagtgcaaaggtcctggggtgagaaagagcttggtgtgatctgggagctgacagagggccattgccaccagagcacagtgaatggggaggtcagctgacgttcactctctgtgccctagaagctgctgaagggtatggcatgctctgatatgcggtttgtcaagctcaccttagttcctgggtagagagggtgggttggaagtgccagggaacgaagacaaagccgtccacagaggagcctggaatctgacttccaggtataaagtattcaatataccaaggtgccgtatttgaggtagcgtgtcctgaagcccctccccatggaatgtggccatcccagagggcagctgtgacttccttggaggtccgggtgaatcacagcgaggcttcaaccactcctcccacacacatgctgtgtcttccatttcctgaagcatcctgaaagccacaggtggtggggaacagctgggcggggcagggtggacctgggggccatgtagagaaagccaatgctgggctgcaccttttgatgtatgtttatcaggagggagactcgggagagctggagtaaatgaaaaaaagaggctgagaatgcagggcgctggaagaaatgccacttcctttattactctgaggtgcatcggttcacatgtacactcaacagtgcacaataagcgttggctgcatttgaggcacatagctacggtgcacaaaagtggctaaaatcagcccctgcctcttcggagcttacagcctgttcctctcccttcacgcccgttggcctataagctcctccaaggctcagctatatcttcttcatctcagtaaccccaggacctacttggcatttagaaaggaacaataaatatttgtggaatgaaaagagagaaaggggagataaaacacgagataaatagctaacaattcaagtaataaagtgatcgctgtcatagagaagattcagatataatacaatgatgaatcagagatgcagagactggggaaatcagggtgatgctggcatttgaagtggttctagaggcatcagtgggttttagacaaagaggagctgggagctgattctctggtcagagggccccatgtgtgcaaaggcatggcaagaggaaattgaccaagtagtggcaagaccactctatgggcagacaatggcttctaagcggaagctctctggaatctgttcaaatgaaaaaaataagggattgatttttaaataggcacattaactgtttggttcaaagagcagaggggtttgtttccctttgaaaagttaaatgatccttctacaatctattcatgtggagaccaaactctttttttacagttgatacaaagaaaagtgccatctgaccctcgttgatttcaaagtctgaattctccagctcccttctccctctgtatattttcatgaagcatacgtcttctttctctaaaatatacctaacaggtgctgcttgccacatgaagtggtcattcatttattgattcttttgaccactcagcaaacacacgttgttgttgccaggcactcagcaacaacaaacacaggccctgcccttatgaaactaactctccaagaatacgctcagttcctgacctgctggaaacccgttcctctctctcccacccagagttcatccaggagtgtgaatgagagagagtggaattgtttattttattgtttttaacagattatgcctcttagcattagaattgaaagcccctggctttccaccccaagtgggaacctggtccccctctcaaaatcaggggtgattttagaagacagggttgcaggtctcctcccagccactagggggatgctcagcagccttcagcagccttaaatttcccatcaactggccagtggctcatgcctgtaatctagcaccttgggaggctgaggtgggaggatcacttgagctcaggagttcaaaaccacactgggcaaaatagtgagacttcttctctagaataataaataaatataaaattacatatcaactgagcaacaagccacccactggtggtgtctataccacaggccagctcactgactgcctgcatcaggatcaccttggaagttgctttaaaataccaattgctgagctccaccaagacagaatttgattcaagcccagagcaagacctggggaacctggaattcatttgctaaaaagtcttccaggttaagatatgggcagtgagatttggaaagcccgcttcacacaatcccatccacctgctcggatgtgcacactggggtcaaagaattcaatggccggcaccaaggcatagataattctaattgttgctggtccctatctgccaacaggtggttattctaaggcccctaaagccagaccacttttaattgaagatgatgaaatagccaggccagccagtgacctaagagtccattccctgaggccagagtgaactcacaggcaccagccagccctggagcttgagctgcccgcatacctgggctgccagtcattagcaaagcaataatagctggcatgtgtggtgcactcattggccagaccctgggctaaactcctcaggaagtgaggccttgcctgcaggccaaagggaaggccaggagcaagatgctctttctgtagctccctggccatgacactctccccagagatagagtgtgcgcatgctttccagctagaagttccactggacccaatcccaggcctcctacccccagagctctaattaggaaaggggggcccccctttgtcaggtcccagagcaacgctccgctcagactgcaggaatctgctctcagccttcctccctggttctcatctctctgactaggaccctcccttcttcatctctgggtcctccatgctcagcccagctcctgggatagatgcccagggcctccgtaaagatttgtcgaatcaatgggctgaagggttgtattccaatgtggaattatcatttcaaacagttagcaaaactctttcccaacccatcatctggtttaacctgtggagcacagatctcagactcattgaatcctgttattcagatgctgacatggaagaacgagaggaatggtcacttgtccaaggtcaagcaggtcgtgcagtgggaagcctgggttaacgcccaagctgtggcactccatgggccattggagccaggtccacttgtggggcccctgggccatggagcatggtgagcaggtcatccaacaaatggtaattgttttgtttgtttgtttgtttgtttgtttgtttgtttttgagacacagtcttgctctgtcgcccaggctggagtgcactggcacgatctcagctcgctgcaacctctgcctcccaggtttaagagattctcctgcctcagcctcccgagtagctgggattacaggcacccaccaccacacctggccaattttttgtatttttagcagagacagggtttcaccatgttggtcaagctgatctcgaactcctgacctcaagtgatgcacccgccttggcctccaaagtgctgggattacaggcatgagccactgtgcccagccccaacaaacagtaattgatgcccaccctgtgccaggtcacttagtaggggagactgacacgtgagcttgtctctccacccctacacacatgtgcgtgtgtacacagaggatctacccaggatgcttggtccctccaagtagaaagttgccaggatcagtcatcaccttaaaaagagccacagcttggcagtcccaggcccctggatgccacagccagggagagcaagtgatgcctactcttggctctgggagagggacctgggaagccagtgccctgcattttctctgctctcttggctggtagcatcaattccattgactagaggagaaatctgtttaacctaatgtgtttcaaatgctccgcctcagtccccatggagctgggcacactcccctgctccccatcttcccctgcccctggcaccttctcactgcctcccccataccggcattgacctctcaggttcccacttcttctctccttcttcaggggctgcctggccttctctgccttttcaaagcccaaaggtgctccaggcccaagctccaatgctcagcttgacgcagcagccctccccaaccctctccccagtggcagaattgaacctgcctgctgtgcccagggagcgccccatgcattccactttagccttctcctgctggctcccacctgtccactcgcatgtctactgtctccaccaaggccatgagcagcccagacagggcagggctgattcttctccatggctcctacctcatgcataggagcaagctccacagaggaccggcaccatctccctaactctctccacctcctgttactgaaggtggacactcttctcctcttgttccttgactttcagtctttgattttcctttttagaatgatattcttctcttctttctctcccccctttccaagagcccacttcctattgcggtgcccttttcctgccatcctgtgcacacaggcttgcacggtgttttcattccctctctccccatgcattcttgcatctcttggctaggagtccctctgtggtcctcaaatctcccctgcaacacagactccagatcttgatgccccagaggcccctggaacttcaaggaggctcccgtttccaatttagaaggagggtcaggggtatttctccttggttgggtcttgggttagtgaagacatttgaggcagggaattgagatgatccctgttgcatccacagctgccactgagttctctacctaccttcccccactctctatttgaccttggacccacaaggaggccactggaactcccagaacacacccttctgacaccagcctagctccccagggagggaagcacttgcaaagctgtctgctgccctctggtgatgcactagggtatggcaacttgggggctgggggtcggatttggtggggggcgtcttgcctggggcccccaaccaccaaggatgggtcttgtttctcaaggctagggaccctcccttattcatctctaggttctcagtgcccagcaacgggtctcaggaaaggctcgttaaattaatgggctgtcaggttatccaaatatggaattatgatttcagcaaaactcttccccacccattgtttgatcaaaccctagcaaccatcctgtgcagtgcagatctcagactctatttagggggctcaggtgcagcccagagaagagaagcgacttgcacaagagctgagagctccccgttaaggcagaattttcctcccccggcagcctccccagctgaggaggctgagccctatgctcatggaatagggtgggggcactggggtcacctgttcccacctctgggtagtggcttgccttgatcaggggccttccagagacagcatcttcacccagaatcagccatcaggaattgtagcccagtgccaggaagcaccctggggggagtaatgggaagttagttccgatgttgaatgcactttggcatgtttcaagcacctcaagtaagggcttgacttaattattcattcgtccttttagaagtgtttgtttattaactgtagacatcgggagacagagatgagcaggacaggtaagttctctgtccccatggagctgacattcccagggctatgctagcaacacagagagaggtggggaggcagtggggctctgccaggaagaggttggatatggtcagcaagggtgagggacacaggcatccatgtattaaatcatccaatctgcaggtgagtttgaggaccactgttatagaacatccttggtcattagagagaacttgaattgtattcttagagtgatgaggagtcattgaaattgacctcggtttgagttttacactgccaaatgatgaagcagggagattggggtggggtgtgatggggctggacaggcggaggtggagagaagaaatggggatgaattaggaagcagacctggcagcactcgctgatgggctggaagggggacaccagaaagtgagagagaagttaaacgtggcccctagggccatagccattgcatttgggaggagaggggctccttcctgagaagaggtgactgatgaagacttgctctggctgagggtgtaggacagaactcacgagttgtttgaatcagattagacatgtctgttagatgcctgagcacagccagcaagtaggttggtggaaacacagggcgggggagaagttgtgaccacagatacaaatatgggagccaccaacacacggatgccacttaaagccaccatcccctccagactcgggacagatctgctggcagccttcagacatcacccaggccaatcctctcattctccacctgagaaaccaaggcccagagactgtggatgacttccgtaaggtcacacagcaagccagccgcagaatcaaaagtcaacttctgactcctaaaggagaactgtttccattccacagtgctcaatgcagcttccccctgacctgcagcctgctgggcagaattgctgatatggcaaatcatttctatgtctgcagtcaggaaaccagagctgttggaaattatctacacacacacatacacacacacacacacacacatacacacacacacacacattatccttttccttcttctaagtaaaaaatcagtaaccaggctgtcagctttattactaattatgcaagtgctttattgctggtatttaaaaaaattgaaggctaaaaatgtccaggaaagacccaatttagtaaacagttcagaataaagtatttgttgccgtggtatttcttcacattagaatttgctccaggtgcttcaaaccttctttaatatattatggcaatctaataaaattcccagttctgggagaatctttgccttggaagataactgtgtttcagggagtgagggttaggtggaattgaggatgatcgggaaggtctggtgagcctgaagttcctgggaaagtaaggctgagagagggcagaagatgagtggttaagagacttgcctgaggtcacagtaagcactcaataagagatagggaaggggatggatggatggatggatggatgaatggataatggatggatggacgatggatgaatcgatggatggatgcatggatggtggatgggtggatggatgaatggatagatggatggatgcatggatagataatggatggatggatgatggatggatggatgcatggatagatggatagatgcatggacggatggatggatgcatggatggatggatggataatggatggatgatggatggatagatggatggattatggatggatggatgcatgcatgcatggatgacagatggatggatggatggatgatggatggatggatggatggatgaatggatggatggattatgaatggatggatggatgatggatggatggatggatggatggatggattatggatggatggatggatgatggatagatggatggatggatggatgagcttccagatgaatcatcaggtttttgcagacctaaatcttagtcaaggaaaagaagtcatctaaaacttgccattgatagaaatgacagaaataaaagttggtggaccattgggccatttgtacaaaatatgtaccattgcctctatttgcaaataacagacttcaactgagataatgaagcaacactgcacaaagctgcagggcagggaagccgtcctcattttacagaaaggaaggagatgatcggacacattgagtaacttgcttgaggtcacatatcccagtagcgatggagctaagacaggggccagccttcctcatgtccagctaagagctatagttttctttccagctcacaacttaggtcctttctctgtgcatcatggcttcttgccacctgagtttcttctacacccacccagcagccagagtgagctttctaaagtgaaatcaggtcacctgctgcttgaagccctccatgggcttcccactcacttgggatagaacccagtctcccatcaggcctaggataccctgtatgctcggccccatccacctggccagcctcatctcctaccctctccctcttcagcttcctaaacatcagcttccggacaccttggccttctcgccaagcttgttcttacctcaggacatttactcatgctttttctctgccagatacattcttcttctaccctggtgtcagatcaaatgtccctctgcagagatgctttccctgactgcctcacctccacccagaatttcccacccctgtgtcccatcattcttaacccattgatccgatttgtttgcttgttttttaaagcattgattactacccagtaagactcatttatttatctgaatatacattttcctttttccctctcatatcaagcaccccgaggataaagacttggtccccctgcccctcctctgtccccctagctttcagaatggcaccaggcagcccctccctagtcaggggccaatgtagatttcatatacggataagcgaattcctgatcagagggcctggctgttgggccatcagctggcattgagcagagaggcctgggttctagtcctgatcctgtgacagagccatagggtgagctggccagtcacacaatgtgtctgagcctcagtttcctttttgtccaatgcacaaatgtgtttgtgctggatgatgggaagccccctcagcttcacttatcggccccttcctcggtgcacgattgagagaaacaggcaatagaccaggccccagggtgaccaggctccaggcacagccaggactggggctgaaaacctgccaccttccaggaacccagtcagccgattggttctgcgtattcgcatttggattctcaggggagtggcctgccctctcaatggcaatttccttgtgagctgggctgacactcctaattattatttggagaggtttggggaggctcagttaattgattacatatttccttccttgacagggcatttgtttggccatgtcttgttttttttttcccctgcttggttaatgttcctgggcatgttgagtattttgtggggaccatgggactaagtccagtcataactctccctcctcctccccaaccctgccaggggctttcgaacactttaatttaacttccctggacctctgcttcccccatgggagcgatgatatagcaagagccctgagatctgaggactaataataacagtgctcacagtaatgtttatcaagttcctagcatatgccctgctctgctctaagaactttacacacatcgactcatctatcctcacaatgttacaacgaagcaggtcctgttatgatttctatttgtagatgaaaagatggagctcagagaggttaagtgacttgcccaaggtcacacagcaggcaagcagctgagccgggattcaaacccgcctgctgggtgaaaactcagcaacagggcacaggctgtccatcgctgccctgtgagtgctccagcaggcttgggaaaaggggatgcgcaatccccatcacccttggccacgtgcgggcagacaggcagctgtggtcggcctctgccgggagctatcagtggtgacactgggcaggactcagagcttcagctccttcattggtaaaaggaatcacaattctgactcctaagctgcggtgagggctgtagtggttctcatcttcagggtgcctaagccagcatctcgtgcacagtccatgaagtaaaggagggctcgaccccaggcccttgctcatgctgtgcttcagaacttacatgcttattctcctggatggaacaattgtcacatcataaaatgcaatcgtcatcttaaggagaaaaggtcatcgcatcatagatgaccctcccaacggcccctaaagggacaccctgctcccttgggtgacctcatgagcctctctcttccatggtttggtgaatgtccccctcctcctactagtctgtggctcctggagggaggggccatgtccacatctccctcatcaccgccaaacgctcaccccggttcccacagagctcagcacaaagaggtgaggagggaacagaagaattaacgggggatctggcctctccctctgcttctaggggaccgcttcttggctcctctccctggccagcctttccaagtgcagcccatgccctatccaccttctggccttgagacatcactggacatcctgttcatttcttcattcagcaaacacgtagtgagcacctctgatgcaccagaggccaagtgcggcgggatgattgggtcatagaaaaagccagagcccctccacacacacacacaaagagtttaggtttgcagagcacctgtacggtttaaatatcttacatggattctctctttgagctccacaacaccccttgaggcagctcatgccccatgtcccatttttatagattaaaaaactgaggcccagacagacatgtaatgaggcagttatagtacagtgtgcaagctccagaatgggctgtgggagccaaggatatgtgtgttccatgcccgggcttcctccacttctgacctcccccaggagactcagacatgcagcaggagcccccttttctggcttgacctgagtgtggtgggaaggcaggaggatggccttgatgacctgtgagacctgtgggcccagcagagcctgagtccatgcccaggacctatgcagcctgcagaagagaccctggatttcaaggcgggcatcaggctagatcagggcagtggggcctggcaagcccaggccagggcactcacaggtgcagcctggagctgctgggaagtgggagccacttggcacctggtggcaccaggtccccatactcatattgctacctccaaggaggggatgcagctctgcctcagagctccaccagctgggtgagagccccctcactgcatacccccatactccccgcccccagcttgccccgagcagagccactgagaaacaggaggaggtagctgtagggagtttgtctgtgggcctgatgccctcaaagggcttccaagtggaaatgctactgtcattgccctttggggaatgaaaggaaatataaaggcatatttcatctctgtagccaccctaggggcaatgatgccactgtttgctaataataacacacactcgggtctagggcttactgtgtgccaagccaagtgcacttacatgtgagaactcagccatggaggggatgccactgttaaccccatttcacagatgagaaacctgaggcatcaaaagcttcaatgccctcccctaggttaggcacctggcaaggggcagagccaggatttgaacccaggcagtcaggttagggtactggcccttctccactagaccacaccccctcctttccccattggcgtggaagttcatttcaggagaaccccacatctgtccctttgacaatgtgggcctctctgagcccctgcactgcactttccatgacagggagcccagtcctctgcaccctgggtgacccttctctccaccgcctctagccgctgctgagggccggcctccttttgcctctgccctctgccagtgtgggaggcagcagtcagcagggaggtgctgcggtctgacagaggaaataccagggtgccctgggagggctggagctgctggaaacggagcaggaccggcagagtgagctgattaggagaggctagcaggggagggagagacagtttggactgagtctccacaccattagctctcctgctctgtttctcccccacctacccagactgtgatgccagccgacgaggccctggggggtgcatggaggccctgccagctgctctagctgctgatgggccaagggggctctggacttgtcataagctccctttacacaccactaaagatccccagtcccgcctgtggctgcatgtgcctcctcctttgctcaacaccccgccatccccagcctcatgaaggctgacagaaccaacagatgccttggtgaggccttccaggctctctactgtggaatccctaccaatttattttccttttatgttaaaatataacatacacacagttaagggctttataaaggagttggtatccatgcacacacagctgcccaggtcaagataaacattctcagcccctcatgaggtttccttccaccaagagggaggtgctattctgacttttgtatgaacttagactagtttttccttaagtctaatttagactattagaatgtcagggagatttctctatgtggttgctcgtagcagtggcttgttctttttcattactacgtagtactccactgcgtggaccttattagtttatttacctattctcctgtggagtggcattggagctgttgcttccagtttttgagccatgacaagtaaagctgctttgaatgtaagcattcatttttcttggaggtatcccttggagaggacgtgtggggtgcagggaaggcaaatgttcagctttcagagatgctgcctgtgcttgtttgccaaggctgctgtaacaaaatgccacaaactgggaggcttaaaacaacagaactgtattctctcacagttctcaaggctagaagtctgaaatcaaggtgttggcatggccacacttcctctgaaagctccaaggaaaagtcatgccttgcctctcctcacttctggtggttgccagcagtccttggcattcgttggcttgtagatgcatcaccccaaactccacctccatcatcacacggcgttctcccgctgtgtgtctgtctctctgtccagatttccttcttagaaagacacagtcactggattagggcccacccaactccagcctgactttatcttaacttgattacatctgcaaagaccctatttccaaatcaggttacatccacaggtctcaggggttaggattcaacagatcttttgggagtggggagcgcaattcaccctacaacaccgcctaacagtttcaaagaacatgtacacattcacatccctgccagcaggatatgagagccccaggtgccccacatcctgtgtgtcccccactcttgacccagctgcaaggatgactccctgtttctgaaagtgtccaccatgcctctccccatccagacattgcagaagcagcacctgccacctctgcctggcaaacccctccccatccataagactaatcactgtccccaggagcctccccaagcacatctgccctggccaagttcagcaggccctccctctgcttcgtctctgcactttggtcattctggacagactccactgtcattctgtgacagtgaaggctgcaggctctggagcggcggagctggtctttgaaaccatgtgaacaagtgtcttcacctctctgccatccatttctttacctggattgttccaggaggaagcccagtgtccacatggctcctgtattagtctgttctcacgctgctaataaagacatacccgagactgggtaatttataaagaaaaagagatttaatggactcacagttccacatggctggggaggcctcacaatcatggcagaaggctaaaggcacatcttacatggtggcagacaagagagaatgagagccaagtgaaagggatttccctttataaaaccatcggatcatgtgagacttattctctaccatgagaacagtgtggggggaatagcccccatgattcaattatttcccaccgggcccctcccacaacacatgggaattatgggaactacaattcaagatgaaatctgtgtggggacacagccaaacaatatcagctccctcctctggtccctctgggtctctgctcaggtgtcacctccccagagaggccttccctgaccatctgctccaaaatgccaccccatcaccaggttcaccttccttctgcttctccgtagcgtgtatctctgcctaggggtgggcacggcatcctcacttgtttgcccatctcttgtctccctcttgcactagaaatcaagtttcctctggtctcctgatcacagctccatctttagcacctggtaggttgcctgaggcagtcaatgcatatctgttgaatgaatgaattaaatgaatccgcaaaatgaaaacaaaaatagcatctactggcaggagcaggggtaattgtcaggagattcactgagataggtcgtgcttagctaggttttagcccagtaggaactcagtcaacgttaactgttgtgttagctttttattgcttctgtagcaaatcgccaccaacttagtggcttaaaataacacaaatttagtatcttacagttctggatgtcacaacttcgagatgagtctcactgggctaaaatccaagtgttgatcgggctgtgcttcttctggaggctcaggggacagtctgcttccttgccttttgcagcttctagagcccacccacataccttggcttgtggcctctttcagcaatggcatcgctctggcctctgctgccatcatcacatcccctcccgctccgaccctcctgtctccctccaataaggacatttgtgattatattagatccttgtgggtagtccaggataatcttccccatctcaaaatccttaatcacacctgcaaagccccttctgccactaaggaaacattgacaggttccagggatttgaacgtgggcatttttgaggcaggaggatgcattacataccacagctgtggttatcactgtgacaatcactcaccatgtccaagtttgcttcctctgttggacagtgaccttgttgcaacacggactgccttcttctttctttctgtgtctctagttccctcttcagggcctggcatacagcaggggctcaggaatgtggcctgagttcctgaagggcaagagccccgttttactcatccctgtacccccaccatccagggctgatcctggccctgaacatttgttggaccgagcagacccgccgggtaccgtgcatgaccggtgaggacagggccccagcagagggacagggaggaccgccgggaggaaggtgagggaggggaagaaactcggggaggtctcgggcttcaaatgagagaggcttgcccttgccccacctcaggtggatcccttccagggaaccagtcatggaactgggtctctgctatggataataaagctaaaacataaggaacacttcagacaagagtgagatgttagagccacctggagccaggctcctagcctctgaatcccagctctgccgcttcctggctgtggaatcctaggcaagtcactcatctctccatgccttggtttccccatctctaaaatggacatgatgataatagtgtctatcttgcagagggctcatggggcttaaatgagttaataaagctcttagaactggcacaaggtatgcaggatagggggctggtgatgattatgtgctaacattttctgaatacctgctgtgagccagatattgtgctgggctccagggagacagcagtgagcaattctgcctctggttacacagggctctccatctccacctggataaggattaatattgctcccattttacagatgagaaaactgaggcctagacctgccgagtgcttgcctgagtccacatacttagaaagcagaggagccagtatttagaactggcctgcactctgggccactgcgctctctcacctttcagatttgcagtgctgggacccagagccctggaactctgccctgaatctttctggaaaacttggaaacagttttgaagcagggggtcttttcctttattacagccgtctcaggaagacgtgaaaatttggctctgatcaaattaggcccatgttgtgatataactttctatatccaccataaagctaataaactaataaattagacagaatgaaaatatcattgggcaaggctgcacactgaagcattgctgtaattactctcacggccggggccaatttctcaaatttcgccttggccaagtttctcagctcaccgtgtccctaataaggcataactcactctataaacattaaattgacttatttattttaaattacagtggaactgaaaccaccttgataaacctattctcctgcatctgccttcctcataagcatagcccagtggtttttttttttttaaacaaagaaaatatctagtctgtctcaggactctttctccaacccagactagctacccctttcttaccacgattccagctttagagatttgactcactcccctgaggttagcggaggtcgcccattatagataaagatgattcatgcctaattaataatgataatggtgctactttaattgagtgggtttgactggtatcgtgggccgggccctctgctacggcctctacaggaactcacttaaacctcataataagcctgcaaggagcgccctctcatgatccctgctttgcaagtgaaggagccagggatcagggaaggcaagtgacttgcctgagaccacacagagtgacttgcagtgaagctgggacccagccagggaggtctcgtgccaaagccttcgtcttcatcactgtgctaccctacctctcagaaaacttgcaccagtggcctgctgggacttcaagctgccatgagacatatttatttcttgagcggtgggaggggctcaaaacctggttgcagggaggaggaggggaagagctggatgggcggatgacatccaggctcagcggcaggtacaatgatggggactcttgctgggggtcccaggaggccacaggtatcttcctggcccagctgatggaggtgcaggagggaaaggggtttgggaagttcatcagagatcatgattggtgcatgagttggggttgataagaggacagcatcccaggcagaggggagagcagggacaagggccaggcagtgcttccagagatctgtggctggagtgaagggaggagagtgtggcgatggggcggggataggagaggatctcagcagtggagagcatttccacggcccatctctgctctccagggcaggtctcatttggccgcatgcagataatgcaacagcgagctgagagttttgctcctcctcctgatctctgctttcatgtcccttcctaggtcagcttttcctgacgttctagtatagcctggtcagatctttctgttctcaggtctaccagcaccccagatgcctctgggaactcctcacactattaattaaacacatatttaggtggttaattccatccctgtctgcaacactagaaagtcaggtccatcagggcaggaatcatgctcatcttgctcactgttatcttcctagtaattaccccatctaccattgagtggcacatgctagacactcagtgtagaattgttggatgagtggatggatgatggatggatggatggatggatggatgggtggatgggtagagggtggatggacagatggtaggtggatgatggattggtagatggtaggatggatgggtggatgggtagatggatggagaatggatagatgatggatgggtagacagtgaatggatggatggtggataggtgtggatggatagatggctagataagtggatggtaagtgggtgaacggatagctggaaagatgagaagtgaatgaatggatggatgggtggtggataggtgtggatggctagataggtagatggggggtgagtggatggatagctggagagatgagaagtgagtggatggatggatgggtggatggatggatggacagatgtgctgaaggtttaatgagatgctgtgtagaagcctccagcatatgcttgacatagaaaagtcatttggtgttctttaggttggaaacacaaagccccggccatgctccagtgcaggtattcccgcttgactctcaagcttactttctggaaggcagagcccctgatgggaaaccaagacccagagccaacctcaagcagaggcatcacgaggccaactgaggtccttggcccatgccattcacagggcctgggctttgccaggcgatgatgcagagcggtggcggttaggtgccccagagactttgggccctgtcagagcagagctgtcatcctgtcccctcctccccagcatgaatctgaccactgctgaggccagagggaatgagtttttgagctgattattggagaatggaagtctcccctgctgttaagggagcagtcctcagggccttccagaaaccacagctgccctgccccttcctaacccttgcttgtggactcagagggtcctactcctgctcagggctctgcatggactctcctttgtatcatcctctatccaaccttgaactctggtgtgaacaattctcctactgtcttgtgtgcaagcccctgcccccgtatttcatagcaggtccctaatgcaacccctgtccctaggtcccagctgtagtctgtctctgggatgccaattcctcccggataagaccctgatttgattttacctcttggattgatagtgagatctccattctttttgtgtaactctgggcatcttattagacctctctgtgcctcagtttcctcaactgtaaaatgaggatgagagtaatagtacataatatagtcatactacctcataggcagcacagggttgcaagaggcataatgagctaatatgtgtaaagtgcttggaacagcgcctggtacataccaagtgctgtgtgttatctattattagtcaacaaataaacattgaacaccaatccatgcctagcaatgttctcaatgctggggctgcaagtagacagagtggctcatggaggtaacctcaaggacagagtccaccctttgttttattttgcagaattgatcgacatctctctctaacactccctgtttgtgtgaccttgggtgagtcacgtaatctgactgtaccctaggtttctcattgaccagtgcctgcccctctaggctttgggcagggctagagatagtgtggatcaagtgcttagaaccaaagccttctcagtaaatggtggttagttttgttcatgctaatttttccaggaccagtggtggttcctctactccaggtctgtggctagaaaaaaacacatttcatcttttcccatactaccacctcactcctcaccacaatcctgtgaggcaggcatcacaatactgaactttacagattaagagacattgcacagagaggttaagcaacctacccaaggtcacggtgttttcaagtggcagagctgaggtttgaccccaagtctgttggatgccactacctgtgctcctggctactaagccacactcctctccatgggaaccacacctgagagccaggacaaagccttgcacttccaggaatcatttgaaaatgtggattcttgaggcttggtctagagtgtttgtcaagagccgcatctatgcaccttctctctggtgcacccaatggctccacattcctgggacctcctggtccttttcttttcccccactcagtctatggccatgaatccacattcatacccaggcctctcaaaagacagcagaggagagctgagtgattggaagaaagcatgaacaccaatgccaatgcatggcatgatgacaaagcaaacacacatgtgctaactacggggcaggcaccgtcctaagtgccttctgtgtattatctcatttaatcctctcaacaacccatgagaaaagtactctcattaccccaaattgtaaggtgaggagatggagacacagagtggtagagtgacttactccaggtcacgcagcgagtcaggattcaaagctgggcagctaggctctagagtccatgccccactgtctttgtcatccacgctattcatgcaggccctagcagtgggggctgaagaatgcatgggaaaggttccctgcaaaatgaaagaccttcctagaagccagcaggtagtcatggtgactatagatggctcttcccaaaccaggattgtgggccacaccacacccagccattggcatttcctgagccagtgtaactgttaaatgatgcagctgtgggaatgaggaagaagccctggccccccgtcccaaatttgcaggtgggtagacagttatttccttccttattctcaccttgccctcactaccatcaaaaaacacgtctccttacattgttggcaattggcagaagggacagatactgagggctttggttgattgtgatgcatccattaaaatgtaccagcttgctgagccacagatcacttctgcaggccttgtctccactgatagggtgcatgcacgtgtgcgtgcgtgcgtgtgtgtgtgtgtgtgtgtgtgtgcgtgcgtttggcaaaatgggactgtttctgcttagaccttggtgagaatccaaggggctcactccaggaatttgaacccactgggcactcacccattcaggtggatgccaccccacttcttccatggcaggatcatccctgagcacctgacggccccagctcactcactgacttgcacactctctcctttggggccctttcctcaccagaccttgcttacaaaccagggactcacagcccagaatcggcctgtcaacacgctctatttgactaacactgaacgtttttaattaaaactatgtttttaattaaatcaatgacaaattattgaaaaccaggagattttacaaacaaatctatacgtttggctttgctttaaaaagctgaagatgtggcttttataccggttattcccaaattgtaggaaacagccaccataaataatggctggatttaaaccagggaatgacctcttccttccctcaccatccacaccactctgtattgtctgaaatgatatcggtgagaactacttttggctccatgcaacaaaaacccaaagtgagtatgtcttaaactagataagagtttatttttctttctcctaagagtcccaggtagcctgtctaaaggacagagggtgctccttggtgtcagggactcaagctccttccctcttgatgttccactgtgcatggcttccattctgaaggtcaccttaaagtttaagaaggctgcaccagctccagccattacatctacattccagctaggaggaagcaggaagaaaaaaaggacacaccccctcctataagaaccctttaggaatttgtgtgtaacacacctacttacatccctctgccagaacttagtcacatggccacctgctgcaatggtaactgggaagtgtagtctctattttgggcaaccatgtgtccaggaaactatcatagtaactattactatgaaaagaagcatagctgctgaattgtttaacttctttacacaggctgtaagcccgtgaagatgaaactttgtctttgactttggctctgagcttctgctacttcattaaaaatttatgtactgttgttcctctcattaagttgttccaaggaattcactaggagatgacgaatgtaagtatgtctagcaaagttttggtacttaatataagctcagcgattgtgcatttgtttcatctattctacaccagatgttacttgtctcccctttgtcaggactttgctcctcagtgaagcctccctgacctcccagcaatttcaaattttaaatagaagcgccccctccactcccagcactccctatccctgtcctgtctttctttttctaaatacacctgtaatcaccgacctgctatatttttcaaaggttactttgtttaccgtctgtgtccctcaactaaaatacgagttctatgaggtcagtggttttggtttctattgttcacagctgtatccctagcacctaggatagaccctggtacatagtaggtactcagtaacgatatgttggatgcatgaatgaccagatagctattgccttctcagagctgggtactgtgctcagtgtgagagacagaaccggaagcaagatatcttctagtttccatctccccatggcactgagcccagagcagaacacgctaagataaatacctattaccttggatcggatcttggtgccagcaggagtccaggcattttaattttgttttgacaaaggggctgataggagaagctggctggctcctctgtctctcatctgctggcagccctgggcaccctggcctgaccttccccgccttcagcaccacgtagcgcaggacagtcaaacataattggcctgccctactttttaagagaacccagattgaaggactgggcttttggtgggctgacctgtttaagagccttaagaggaagctcggagtttcaattttccactgccaaagcaaagctgtttttagctccgctttgatgaagcggcgggagtcaggtttggccccgggtcatccatcagctgacctggttgggaaaggcctcctgtgggggccccaggcctaaccacagcttcgcaaggaatgctcaggtttgctttgcccaactggagtcatcggtcctgctctgaagctgcccctggtccatcccaaaagacagacagtgagagagagatctccagccattctcaaatattttatcttgttgatgggcccctggacttgagttcctgcccaattcctccaggagttagctgcgtgacctcagacaaattgcttggcctccctgggcctcagtttcctaatctgttcagtgaggtttatcattctgatctcaatgggtggttgtaggtactaaatgatgtaatgccggttgactgctgtgtccatctcaggctttgaggatatttcacctggaccctctccctgcaggaaactgggctgattgacatccacgcgggtaggccaagtcagctcagagctttctctctgaattgcagtgctctggcatgctgcctgcttttctaggggtcaagcaccatctctttgaacctcttttctgatcgttttgtcaaactgtggtggaagagtttggcgtcgggggctctggccctatattggagggacccatatgatgcattcttgctggagtttgcttccagggaaaacatggtccctgcagacaaaagggtctgcccttggtcaccagaagcagaggcaggttgtgcaccaggcctccatgttgctgtagagccacagtctgatgcctcgatgaccccagagcctccactcactctgcctgccctttatgactctctctccagcctgaaagagtttgtttctgttctgccactgattgattgtgtgaccttgcagaagcctcggcctctctgtgtgctacacccacctcaaacagcaactagcctgtgagttaagggcactgtcttcatccatttggaaagctgtaataaaataccataaaccaggtggtttatgaacaatagacattcatttctcacagctctggagaccgggaagcccaaggtcaaggcagattccaggttggctgggggcccactacttggcacatggagccctctcaccccatgagccagaaagtggctgtgtcctcccatgctggaagagaccaggcagctctctggggcctcttttgtgggggtgctcatcccaccgtaatcgcctcccaaaagcccctccttctaatacaattccattggtaattaggtttcaatatctgaatttgaggaggacacagacatttggaccgtagcaggtatcagctctggagcctggctgcagggttcaggacccagctttgacactctctggttgagtaacttcagccaacaagttgtaagcaacatccctgtgactcagtttcctcctctgtgagggccgggtgacaataacaacacctacttcatgggagtgttgtgaaattgagttttacagatggggaaactgaggcattaacttgtcccagatcactcaactacagcatgttacagctgggtggttctggcccatgggaaggtctagagaggttattagctattattgttcttattgcaaaaggctttccctgagaattgaatgagatcagttttcagtgcctcgcacagggtctcgcacacaggaggtgctcagtgaacctctcactggtacactgatgaacgaggcctgcatcggctcctggaactcaagggcgagggacctgatgctgaccttgcccacagtaggggcacagccatgttcattgaaaaaagatcatagaaacaacaggttgaggaagtccgggaaacccagaggcagccaccttccacgcccgtcttccctcttctggtggaggcaggcttggttccaacaggcttggggccttcctgatgccagctctcacccaccaccaagtagagaggcagaggcagagattcctgttaaataaagcaatcacgaacgataggaaggaggcggcgagctcagccacgggcccagccttccaagtttgctcactgcccagcttctttggtctcatttccctttggccaaccacctggctcctggttccccaccacacggagtctttttctgaagagcacgtgccccacgccccctgcctgccagtcctgggatggcgtcgggtgaaggtaggaaaaacactctgaaccctgggccctcccgcccctgcccacccctgaacccagagcctgagtccaacaggctgaccagtgaggggctaagtggatcagtcaggacctggaggaggaagtggtttccatggcagcagccagagtctggaaaagaggcctggagaggaagccggtggagaagagcgggagatgtcggaatgggtgaaggggagcgggaagcgatgggccaggaagtcaggggaaggggtcagccagtgaaagatggagggtgggaatggggaagcgggttcagggcccaaggtgaacagcagtggctggacagggcaggaaagagcggtcgggaccagcgaccccatatctgtcaccacccaagggcctgtcactgacttcctggcttggatgatctaggatcccaagctaagctctctctggtttttcttggggtaattcaacattggaaaagaaaacctgatttctcagaggtgctttctcacattggaaaaaggttcctaccagtttgcccactggtaaatcatgactggcaggtctggggtgtccctctagtcaggagtaagggagctttccatggtgaccttgtcctgtcccagcttcaccacccagggcctcaggacaaagggcttgaggtgcagaagctgaagctgagagccgatgacctgcctgaggtcacacagtcctgggaggtagagcagagtgtggtgagccccacccgtccagcaccaaaagtccccttgcagtgtgaagatagaactgagaaagatgtggctcaaacatggcccagtgtgagtcaagagttgtcccctcgttctcacccttcaaggtcagcaggaggaaatggccaaggagctaaggcagctgggccgccaacgatcaggccaatttaagagacgtctatggcaggggtggagcctgagaggggtcccaggctccctgaagcgggtgaggggagggcttagggagggagctgggggcagggcggagagggcatcggctggagtattctggaacttctcccctctgtgcctactttctttggtacccctcctagccagccctgcattccagtggatgccacagatattttgtacccaatgagcaactgtatgacagaaaccattttcaggttggggggcggtgaaaatcatactaatggctttttaaaggccctgaagaaaaagatttcaggcagccttggaattggcgaaaacacataaggaggaaggtcataaaattcccagtgtccaggggctcagctcttaggtagtggggcttttccggaggctccaggccccctgtccagcgctgccccatccctgcctctctccccggtcccactcccccatcccactcccaggctgtacaacctgggagaccttccatctgtgctgagtgttctcagggaagcccaccacattaagaatggccgggctcctgactggctccccagccagaggaatggctggaaggtggcaggagaccccaggcagtgggctcccagccccatggaatgattcggccgtgtcttttccctgtttggctgggggagaagttggacccaaattctcctgcgttgtgtggtgaaaagagcaccatgtatttctggctcattgagataccttgactcattaagacttctggctcacagcagccacagctgcctatcactgagcacgtactccacatccgcctctggatggatgcataggctttgtaacaagatggccggatcgccaagcctccccaaccgcctgcagggggcggtcatgagcccccatttcccagaacctttgacggatcacctggtccaggtggcccggccgcttcttcccagatctgctgctgattgctgcctggccttgcataaatcacctccctgtctttagttttcttgactggacaaaccaggactagctggtcaccctggttaagaccagactcttctgggagagctattaaaggaatggagcttctccatgtacattctgtgctcacaagacaggtcccttagctcaagggagggtctcctgtgtccccctgcttttctgcttggtgctgtccaatggccccacccctcccggaggaagtgtgtccctactgtgtccctggaaagggcctgatggaggagaaaacccagggcttggccaaaaggagggtagggagtcatttcaggatttcgggttattccgtcttcggtatccttggagctgaaacttcgccttcacaggcaggtccccaggaatatattgacaccattgttaaggtgtccttagtcaagttcacagcagggaggatgagacaatttgctcttgagctaggcctggagtctgggtcccactttctgggctgagctcgagtgtagacccacctccaccaggcagggaaagacagagagtgcatcgccatctctttcagaagccggaggacaggaagcaggtacagagcaggggctgggagagcagagcaaggctcagcattcggttagtgcaggggccatgtctgtgtgtgtacagctttctggcagcccctggtgtttgaaagaacccctgtcctcaaggaatgtccattcaacgatattcattaggcagctgccctgtgtcaaaaacatccaagcactaggctctggtatttgaggtttggtgaagccaatggaaggagaccacccagtgtgtctgcggtggggcagggcaagggtaaacagatggatggactgagggggagggagaaggactgaggccctgagtcttcgagcgggcttgtctgaccagcagcagcggtacctggtggctggttagaaattctcagggccccggaatgattctgccatgcctctttcctatgtggctgggggaaaaattagaccacaactccccagcattgtttggtgaaaagaacatcagctatttttgattcattgagactccaactgtaggctcaccataatctgcgctggaaccaaatcctcaggggattcttgtacatcccagaacccccctggggtctcctgtaagggaccccaccccaccacaaggtctagggaggccctttcctgcctgtctccatctgttttcccaggtctgccagctaccacaaatgctacccccagtagctaatctattccccagtcctgggaggtttgtgctctcacccagggactgtgatggaaaagcaagatgccgtgagggcagccggggataggcagcagccagggctggctgagcaggtgcacacctgggtcactaggccaagctaactgacctgagccacccacagctcccagccacctctgccaattacacaggtgtgaggaggtggggggaagagcagagacctcttccccgcccatgccccccccttttttttccagggagtagcaaaccttttccatgtgtcttattagcaaacatccctctagtacccagagtggccagacactttatcgccagttttattagctctgcctcacggctctgtccaggtggagcaggcattctgcaaatgttgcccccatatcacagggcatgaccctgaacttggagaatgagcaggtgttggagggagtgagaaacaaggcccaggcctcagggaagaagcagcccatcagggatgcatggcaggcgcagaaacagtaaaacttcattacttcatgcttgggatctttccagcaggaatgagggagggcagagcccaggcaggcacttggctcataagattgcagggggtgtgtttaacctacttgcaggaacaactctgtccccagccctttagaagcttggtttccatgcaaacaatggttatacaaatgaaaagcctctctcatctcttcattaaagcacagcctcaaaggacccatcactacctgaatcttctctgttagcccagaatgagatactgtgtatataaatgaagacgtttgaattacaaaatgctttttaaatcgggtagattatgaaagtttggtcctgaagagtcttctccttcagttgctgaattttggcaaggatgcaaaaccacacaccacgttcctccctccatctgtccctcccttcctcctgtctgggtctgggccacatctgagtttgcagtcagactgaatttgggcttgctcccgtagtcgatggaagctgcaggaagggtttatgttgggaaaggacaggccagatcttcgctgtcataaggtcactctgacagcagggtgggggcctcaggcagggagatggtggcaagaatgaagacaaaaatggagaggttctgggccaagcaagacagtggggtggaggcgaggaaacatcgatgagcctcctgtgccacaacatcctctaatctgggcgaagattaaaagaaaagagggtcaggggcacccaggcaaatgtcatgcacccttttctcatagagaaatcctgtagctccccattcttcctctccaagccttttgatccacgttgcacacacaattccaacaggacttgttatttgaagctcactgcaaattgacagcaacacttagaaagtaggaataggttggcggggaggggcatgaggggcaacatggagtgagctgcttctagaagaaggcactgagcagtgtgggcaaaaagacaaaaactcatgaaaaaccaagaagccatcatgcagccactttagaagacatttgagcagtgtcttataaagttaggtataggaccagccgtgccatgtcctcatttgcacacacagcacctctccctgggctaacagagacgatccaggtagctgccaggcctttgaggctctgttttaatgaagagagagccatccaggtgtccatcaacaggaggatgggtaagtaaatggtgtgtagccacgaaatgcgatgctgttcagtaggaaaagggacgcaacaattggtgaaggcaacaacatgaatgaatctcaaaataatgacaaggagtggaagaaaccaagcaaaacatagtacacactttgtgattccatttatataaaatcctaggaatcatgatttatagtgacagaaagaggatcaatggctgcctgaggatgaggggcatagattataaaagggcacaaggagctttttgggagagatgagtatgttcattatcttgattgtggcaatggtctcaatacattgaaacttatcaaatgtggaaatgctgagtaggtacaatttattgtttgtcaattataccccaataaagcaattaataaaattgaaacaaacaaaggcaaggatcccaggagacatttagcatcaggataaactcacctaacacattgcaaaacccctaagactcgacaggatgagattgatgtttgttttaatgaccttgatcctgggacaggttaattaacgtccagcctcctccctctaagaagtagacggatgtagactggaggcagattccagagaaaaggtgtctttatagtgtggtcatttaaaagtatagatgttcccggacttatgatgggattacgtcccaataagtccatcgtaagttcaaaatatcttaggtcgaaaatgcacttaaaacatctgatctacagaacatcatggcttagcgcctaacctagcttaaatgtgcggaaaacactttcattagcctacactcgggcaaaataatccaacacaaagcccattttgtaataaagagctgagtatctcatggaatgtattaaataccatactgaaattgaaccatggaatggttgtatggctactcaaagtctggtttctactgagtgtgtatgactttcacgctgtcttaagtaaaaaaatcgtaagttgaaccattgtgagtcggggaccttctgtattgttttgtctgtcttgttcccttatatatactcaacaccacaagcggtgcatggtacatggtgggtgcttaacgatttgttttaaaattttcatcaattaacagtgtaaggagaagaatatgacaagcactcccagcatgccaggccctgttgtaagtgcactggtatgtgttcattcattcaggcttcagttctcagcaaaagtcaaatattggatcacttggttcttcaacagcacaggaaaagcaaatcaaactcatttcctgtgtcctcacagctccaccctcccctccagtgtctccattctatgaaaatctaggattcttcccagtggaaaggcaaaaccaggaaaggaaagctaagcagaggctgtaaactcgtgtggggcgtggagaatgtgcacaggacttgctcagcaaacctcagtcatcagaattaaggggcccgccagaagcttggagcaggaaatttaggaaaataaaaggccatcctgtttcttccagcagggagaaaacatatggctctcattacctagagaggtggcaagcctcagaatagagacacgctcaagagtgatggaggcaaattcagagaccagagagctcaaatcaatttgctgataaaggaagatctgggggcagtgggggagagcattcatgggctccagcctccatctggcttgaattcaaatcatgccacctactcactctatgtagcaaagattcagttagagagggtaaaatgctcagtgcagtgcctcctactgtaaatctttatacatattggcacctccccagatgctgtaatccacaagacaggtgtcatagcacccatgtatcagatggagaaaccgaagctcaaagaagccaaaggacctcatccaacatcacatgctagtcaggtgcagagccaagactagagcccagggctcttgactcctggtgcagactgtttccactaacctcattcatacaggtgatactccttgagcacctaccaagtgaccaggcttccctccttgcctgggagggaaaagaaacaagttatactgcagcatgacatggacaggtatgtgctcccagagacagatgcagccctggagaggtggagatgaattatgtctttggagggctgggcagtcaaggtagcctgcctggtggaggtggcatctgaatgtagagcctatagagcttaacattataggcacaagcatggaggcagggaccaaaacctctagcatccgtgtacccactcccaatccaagcctcagtttagggcatggcatacttctgttgaaggtggatggcccacagccctggctccagattcagcagaagctgcagtgcccagcgcttgcatggccttacctagtgaaggcatgcaggtcacggggcatgcagcatccgccctcgctgtgcctggcttttcaaaaacacaattactcacccttcagagatgccgtcggtgttggtaaactccagccgctaaactgcattacactgatctctccagaaacctttgcagttattaatagtttattgatcacagcccattgctgatgagagcaggcctcctcaccctcacccccctcgggtccctgctatctgtggaaagccttctattcatcatgcagatcaatgccactcaattctggggaaagggagtctctgggccacttaatccactttagaaagaaaacagaaaagaccaaattttagatgaggtgctgagaagagatggattggtcaaaatcaaagctgtgacctggcagctgtttggtctgccaatgagaactagaatctgccttggttggaagtggggggatcctggccatgtcagatggtaacaggggaaaccaggtgaggggtgtacagcgatctctgttatatttgcaaatcttctgtgattctaaacttatccaaaatacaaattttatttttttagaaaataacttggctcatgggaggaatggaaagaatgccactgtagctggaggaaggggcaggggcgagagagaagggaaggtgggagacatggctggaggaaggggcaggggcgtgggagaagggaaggtgggagacatggctggaggaaggggcaggggcgtgggagaagggaaggtgggagacatggctggaggaaggggcagggacatgggataagggaaggtggaagacatagctagagatgtagaaggaaaaagtgtgctgggccctgttggccaagatgatgattcttatctctctttttgccattttttattgataaactttattttttagagcagcttaaggttcacagcaaaactgagcagaaagtacagaaagttcccacctgcccctgtcccacacatgtacaacctctgccaccattgacttcctacacttcagtgacacatttgttaccatcaattaacctacatggatacatcgttaccacccgaaatccgtagttcacagtagggttcacttctggtgttctgcatttactaggttttggcacatgttactaccttttgaaatatttttatcgaattgatattgctgtttcatattttaagatttacagttttatttctatttaggagatttttatattctccattttattttattttatttccataggttattggggaacaggtagtgtttggttacataagttctttagtggtgatttgtgagatttaggtgcgcccatcacccgagcagtatgccctatcccaatttgtagtcttttatctctcaccccctcccaccttttcccccaaattcccaaagtttattgtatcattcttatgcctttgcatcctcctagcttagctcccacttatgcatgagaacatacaatgtttggttttccgttcttgagttacttcccttagaataggggtctccaattccatccaggttgctgtgaatgccattattttgttcctttttatggctgaatagtattccacggtatagatatataccacagttttttaatccactcattgattaatgggcatttgagctggttccgtatttttgcaattgcaaattgtgctgctataaacatgcgtgtgcaagtatccttttcatataatgtctttgtcataaaagcagagagagcctttgttgggacttaggtaagggagtaccattcatctcatttgcatttgaaaagatctagattctacctggagaatggatcaggagggagattaccagggatagaaagcccagtaaacctctgcctccatattccaggtgagaagagatgctgactgtggagatggagggaagtggatagttcaggatctattaggagtagaacacccaggacttggtcgctgtctgtatttggagggtgtggaagtgggagatgtcaaggagggtgcccaagagtgtgccttgggctaatggtggaggacaggtctggacattcaaggaactagggaacctgggcttgctccttcaatcgatggtagaaggagcatctggggctgtacacatagtcctcagtgagaagctgcctttttcataaagcagcaatcccggtgtaccccgagctgtcttctataccacctgtgagatgtcacctacatgtgtcacccaagcatattgcttacgttactatcacctgagcatgtcatcagggtagcagttgcctaaacatgacacctgtgtcgctatcctataaacacatcttctgcagccatcacctaggtggtggttacctgcacgtatctgcctgggtgtcaaccatgttattattatcttattacctcacctggagagctgccagctacacatgtctcctgagcctgtttctttacagagctgtcacctgaacctgccacctgaactcctttcacctacaaaagtcatttaagcaggttgtctttataaccaacacctatgagtgtcaccaagtgcaaattctgctcctactgtttgtaagccatggggtcttgggtaagtcatgccatctctctctgagtctcttttttttttttttatctaaaatatgtcactccaggtgactgtcactcagtaatggcgcctggtagagaggctattttttcagtctagctgagttacaaacaaagaaaatcattcccagaggggagactggtcccctgctgttcccatgtcactgcgctctttattctgagatcagggagtggagggggacggcgtcttctcaacaaagtccccctgatgaaaagcttcccattctttaagtccttccatgacagtcggtagaccagatgtcaacctctgtgtgttctatgtaaatgaaggtgtttgtttatgctaatgtgtgctgggtggtgggagggatgggctggctcagctcactaagacgacagtgatggaaaaagaggctggcagcccaggtgtggggggacagtgagtcacaggggaaaaggagccagaagacgaagatggagcaggtagctaaaaggagagaagaaaagagcgaagctgaggttatgttgctctgcaaaagcaggtgggagagcaaagtgggaagtgtgtccaggaggctgaagggaggataagaactggattgaaagaacctccattctcaggggtggcagatgggtcacacgcccaagagcctgagcgccaaccaactgctgctcttttgtgtccccagtggggtccttgtcaggcaggttagtcaggtaagtccatgggtatggatcccttcccatagttttctgctatgacttgagaacttctaagacttaaacagaaccccagtccctctaagttgtagccagaataggctggaactcgcatgaagacagacatatttccccaatgcagcaatgacatagcctctgcaactccaggccaaggctccttcccatccaagtgtccagattccacttgccaggaattcgctctccccacagagcttcgcaggacccaggaaaaacacaaaatggcccctctatccatttggtgcaatgttcctgcttacaaaagtcctgcagggacatcattgcatttaatcttcactgcagtcacaggaagtagcatctccactgtttaggaaagaaaatggagtctccaggagagatggactgacttagccaaggtcccatgatttacaaacagtaggagcagaattggaacctggttctctttgactccatgtcaaggctcttttcaatatagaagggaggaaagagcctccctgcttgcattttccatggggagacagagcaacataccaactcattttcacatggtctgaccctatagatgctatggaaagatccagaacaggagccatccaactacagcctgcaggccaaatctagctcatcgcctatttttttacaacttgtgaactgagaatgctttttatactttgaaatggttggagaaaaaaacagaagaaggatattgtatggcaaatgaaaattatgtgaaattcaaatttaaatgatcataagtaaagttttattggagcacagttgcaccaatttgtttacacaccgattgtagctgcttttgtgctgcaaggacagggttgaattgcaattgtaaagggcaagaaagcctaaaatatttactctctggacttttaggagaaaagactgaaagcaggtttgagggggtctctcccatccttagggatcacctcttctgagacaccctcccaactacctcagaggtggaagtggctgctccccaacctgagctcagataagctcacgcttttccatgtgagtgtggaacccagatcagcttctctacctccttgtctactgggatgggggctcctttgggacctgaattttattgtctttctcttccatgatctcaggactgggcatgaagtggcagcatggcggcatggagagagaaattcaaatttccatactggttcttattagcaattgagttccgtcctgagcctcagtttccttgtttatgaaatgggaatatggaccctatgtggaggccgtcatgaggaaagagggagccgatgcctccagtgacagttttggtcccatactgcatgcagcgacatactaaatgcccatacctcttcacctgtgccatcctcacggctccctggaagtgggcaccatcccaggctcatggaagccaacaggctaaataactgctccaggacccactgagcacaaattgggctctggctgaacacagtccacaccttcactgtctgagatgccgagcacagggtctgcatacagtcggtgttccataaatgctcccctcctcccagcccagcacacaggcctgtgtttgttagtggaggctgcaccagtgggcatcaggatgagtttccttgaacgctgcctcacccagccccacgatgaagggccctcaccctgtcttctgcctcccccaggctgcccgaggtccggatctcagacaatggtccctatgagtgccatgtgggcatctacgaccgcgccaccagggagaaggtggtcctggcatcaggcaacatcttcctcaacgtcatgggtgagtgcagggccactggcccctggtgtctcagtgaggaggacgagtatgcttgagtgtgtgaatgtgcgcacagagtggccatcctgggggccatccaccagaagttctgttgtgctggtgtcttccctttcctgctcttgttgtggaggggcaaccagaccaagctgagccaaggtgtgacccgtgaagtcttgccccccatgggcctcccctcaggaggtccccttctcagcacaggtaccccaacaggaccctccccagggagtgaaggatagcacctcagccgagatgcacacctgctgcagagggaactattctgcccctcagccaaaagattctcctgcacctcctgaggccttaatggagagggcataggatctggagatgaattagaaagcgctcatggctgggattcagagctcctgggttctcaccctctccccatgcctccatttatgcacatgtaaaatggaggtaataatactggtgtctgtctctagctggctgggtccttgggtaagtctatccccatcccagactcagttttcccatgtgtaaaacaagaatgctgctctgcacgttctcagaagcccccactggctctaatgttcttgtcagatacacacctttggattctggctctattgcaaggatgctggggacttggccttgactccagactctgtgttctccggttttcttatcaaataatacgtatcagggaaacaaagcttgcggtacacaggcaatcgatgaaagcataaaggccctgctgaaagccgccgcttctggggaaattgaaaacctccaaaggccagacctccagagggacattgattcctgcagcacacccgtggtggttctggcttcccgatggagccacaatgcaggaggtggcattgccaggaaaagcccctctctcgcagttactcatgcaccactcagctcctctgataaaggaactagcagcgtttgggtgcctggccctgggttggccacaccagggaacctaggagggacagaactcagtttgcaccatcaaggaactccaagtctgatgagagacatgtacttaaccaatcatttatgcatcacaatgtactgagcacctacctatgaggtggccgggaatggacccaaactttttataggaaaaatgcttatctgtagagattttgcaggagacaagcataaaacacatgcatagatgaatcaaaaagagcctgcaacatgctggaaggaaataaagcagagtaaagggataaagagtgactgcaggtgggtggctgctagcatagggaggggactcagggaaggcccctctgcagctattgggctgagtgctttacatgtgttatgtcatttagtcctcacaaccaatccaagggtacgtgctagcattaagtccattttgcagatgcagaaatggatcacagagaaagcaagcaacttgcctaaagtcacacagccaagatcacaaaatcctcctatgatatcaggcagctcagtgttgggccaggacccaggcatcttgactccaaggccagctctgtcgcattgctggaggcagtgaagacactgcgctaaggcctcaatctaaggtgccttcaagcaaggccagagtccttaaaaaccatccctccatgaggcccacacttcctattacttcaccaaagaaccctgagcaggttattctcctactgtggcctcaatttcccccatctgtactgtattagtccattttcatgttgctgataaagacatacccaagactgggcaatttgcaaaagaaagaggtttaatggaatcacagttccacgtggctagggaggcctcacaatcgcggtggaaggtgaaagacacatctcacatggtggaagacaagagaacttgtgcagggaaactcccctttatgaaatcatcagatcttgtgagacttattcactatcatgagaaatagcacaggaaagaccgacccctatgattcagttatctcccactaggtccctcctacaacacatgggaattgtgggagctacagtataagatgagatttgagttgggacacagccaaaccatatcatgtatcatcagagggttgaccagaccatcctacactccctcccagctctgacacttctgagtcccttactccatccactaggtgaggaaactgaggcacagagtgatctcgtgggactcactcaggttgcacaactggcctgatggtctctgctgagcaagggagtgtgctcctgtgggcctcaatttccccatctgtaaaacagggataaggatgcttccctcctagggtggctgtgaggcttaaagtagataaagtttgcagaacgcctacctcatcaagaatatcattgaagagctcagttacttggacactgttgtttttattatcactgtctctgatgtgcccactcctgggcacaactgtgtctgcctccctcttgcccctggttttggccccagcaaagagaagtcccccattcacagctccaaagagccctgcactagtctgaggaatgactgctctgggaacacagcttcacgcaccgtggcaacctggaagccagggtgtgtctctgggagtggcagagacaggggtctctccttactcaccttctctgggcttcttccccaaaggtctgcgtgtcctggcaccatgcacctatggaaggagccaggatatatcccaactgtcataatgatggcaatgccccacacttgcccaatctgagcaatttcagaggggctttcacattgaggacatcatccaatcctcactgcagatcggcgcgtgggggattactattatctctaactcacagatgaagagactgagacccagggaagggaatgaatttgctccaggccttatagggtgggggttatctctgtgccagaggagcgtggcttctgtagctcaccaaggtcctgaatggtgaggggagggccgggggaggcggcgtggctgagtgtttctcatacagcatctcctgtaacccatcgaccacatgggcctgggaggcaggcaccacaataagcccattgcacagacctggctcagaggggcatgggacttggccgaggttggagggttaaaggagataatctatagaacagaatgttctgggcctgaggcttggcacattctggatgatcaataaatagtatctcttaatgacaaatagtagtcgggtcagttacaaaccaggcacaattagaccaatctctgtgaacgtctccttcaaatatgtttcagggcaggtttcaaaaattaaaatcgactcattgctttggttcatctgtggcattgcattcacacacaaagaccctctcttcaaacgagcagaggtcactgaacattggggtctcttttgtgccacacgggaccctaagggccactgcagccaaactggggcaagacagaccctccccagtttggaggtcaatgggaagctcccaggacagtggggagaaggagagccgaggagctggggacggcccagggcccacctgcctcaaagcacagagcagttccaccagaaagcccagcaccccagtctaccatccacacgtccacatccagcacattctaacgcggccatttccagaggcctccgggtgaagatgaaaacgcgagtgcagctgtaatttcacgcctataacatcccactgtgtggtggggaaagacatttgggagtcccgtgggtgacaccaagggtgtatgctgcacacggtcattaaaatgtttttatccgagctgcagataaattgtaagccaatttgaaagttgcgtgctgggccccaggaacgcattatacacagtcatggaaggattttgaaggttcttctgggggtgcaggttaggggggagggagcgtgttaagggtgcgctgttacaatcaattagatgttgtgagagccaggcaccccactcccatccccaccgaagttaaaagactctgcacttctggctcctctggaatgccaaggggcagggtttctctgccaccgagtggggccctttcaacccaaagctaaaaagcaaggccaccctccgcgtgccagcattgagctcagtgttcaacccacagttaatacctcacaaaagcccttggatgtgggcctggtcatccccattttacggatgacggagcagaggctccgagagtttaaggggtacatccacgtgagtcacagagcagggtgggcaggagcggggcgtcccacctggtctgcctgagcccagagcacgtacttatacagcagccttaactcccaaaggaaatttccctccccttgacccaaaggccatgagtcacacaaacctcaaacaagcactggagtggagacagagtgcagggagtggggacttccttgagaccgagccctaactaggtggctcaaaaactccgatggtcctggcatggtggctcacatgtctaatcccagtacttccggaggctgaggtgggtggatctcttgagcccaggagttctagcccagcctgggcaacctggcgaaatcccgtttctacaaaacattagctgggctgtggtggtatgtgcctgtagtcccagctactcaggaggctgaggtgggaggattacttgagcctgggaggtaaaggctgcagtgagctgagatcacgccactgctttctagcctgggcaacagtgagaccctgtctccaaaaatgaaacaaaaccaaaccaataaaaccaaacaacaacaacgaattccgatggatgggtggggctgtttgcctttcggaacatgtaggagtctggaaggaacacagaatgtctgtgcccttgcctcccttcctgtccccatccccatttttggttctctcatccactgctatccagcacctcccccacttctcaaaccctctgaaaggagcactgaacttggagtccagcagacctgggtccaaatcccaattagtgtctacttttgacatggacggtctagtattgagtttcctttctggtaaaacagcatatcagaatgtcttttttgttcaaatatattataaggtgacttggatgcccacgtacatggacattctaatttgcatttattcatttgtgtgttcattcatttaacatatatttattgagcacctagtacattgcaggcactgttgtgtgcactggagtttccaatgaacaaggaggacaaaaaaaaaaccaaacaaacaaaaaactggtcctcacagacagtgcaataggggaggcagaagatgagcaagtgaagagatggggagacaaatgggatgtcagtgggtggtaaagcaatgtcaggaaaaacccatcagggatggggctgttctaggtcaacgtggcctctctgagaaggtaacattcaaaagaggtgagctatatggacttcattcattcatgtcagtgattcagtgacttactgagcattccccaggtgccaggcacaattctaggtgctgtggatacactgacaataagacaaggtccttgctccctggactcacattctctaagggaaatagcttcatggtacagaggacgaaactagtttctggggcttcccatagcaaattgctgcaaactgggtggcttaaaaccacagcaatgtattgtctcacagtgttagtcctagaagcctgaaatcaaggtgtcagtagggccatgctccccatgcaagggaaaaatccttccttgtccctctgcttgcctctggtgttgctggcaatccttggagttccctggcttatagatgcatcacaccgatctctgcctctctcatcatatggccttctctctctggctctgtgttcctgtccctgtgttcagatttgcttctgcttctgcccctgcttctgcttcttctccttctccttctccttctttcttctttcctcctcttctccgtcctcctccccctccccctccttcttctccttcttcttctccttcttcttctcctcctcctccttcttctcttcttcttcttcttcttcttcttcttcttcctcttcctcttcctcttcttcttcttcttcttctcctcctcctcctcctccttctcctcctccccctccttctccttcttcttctcttttttttttttgtgtgtgtgagacagtcttgctctgttgcccagggtggcctcaaatgcctgagttcaagcaatgcactcaccttggcctcccaaagtgctacaggcatgagacactgtgcccacctcaacagatttgctccttataaggacatcagtcattgaattaggactcaccctaatccagtgtgacctcatcttacctttagcacaattgcaaggaccctatttccaaataaggttacatttatacggactgtgggtcagaacttcaacacatcatcttcagggacataattcaacccacagcagtaactgagtcaggatgtagcacaccaagattccctgtctgactctgaagctgacactctctgctcccaaccccgtgggtcacccttcgttgggcactgactaatatgcaggcgctgtgctaaactcttcttgtgttaactcactgaacactcacaaaagctctgcaaggtgagtactatcactttctctttagcagatgaagaaattgagaggtaatgtcacttccctacatcacccagccagtgtgtggcagggcaggggtatatagccatcctgcatgttaacatctctgctcctccagaagtttaccaatgagtaggaagcccagactcataaagtattggtacacattaataaaatgttctatcttgggatccttgtctctcttctggaagcttccaagtgaggttggcagatgaagtagacttttggaacctgaggccagagtggcaacaaaccacaccatatgctttgcaagtctggagccaggaaacacagcttccaccccaaagaacagatgttaatgaactttacatgacgtttctggttggtttgtcttttttcagtatgttctactgatttttattaagtgtgcctggtgcattttccttgttttttttttttttgtttgtttgtttgtttgtttgctctgttttgttttgttttgtcttgagacagtcttgctctgtcccccaggctggagtgcagtggcatgatctcaactcactgcagcctctgcctccaaggctcaagagattctcctgcctcagcctcccaagtaactggggttacagacatacaccaccatgcctggctaatttttctagttttagtcgagacgaggtttctccatgttggctaggctggtcttgaactcctgacctcaagtgatcctcccgcctcggccccccaaagtgctgggattacaggcatgagccaccaagcccggccctttggtttttctaaaatatggttttattgagatacaattcctataacatgcaatccgctcatgtaaagtgtaaaaaacagtggttttaccatattcacagagttgtgcctctaccaccacaatcaattttagaacattttcatcgtcctccaaagaaaccctgtacccatcagcagttacacaccaccccacattgtccctcttctcctcagtcataggcagccacaaacaccctttctgtctctatagatttgctggttctggatatttaatatgaatgagattatacaatatgtggtcttttgtggctagtttctttcgctttgcataatgtcttcaaggttcatccatattgtagcaggtaccagtacttcattcattttcaatgctgaataatattccttcatatggatagatcgcgttttgtttatgcattcctcagtggatggaaatctgggttgtttccactttttggctattatgaacaatgctgctataaacattcacgtgcaagtttttgtgtgaatgtgtagtttcagttctcttgggtatgtatccttggagtagaactgctgagtcaaacaatgactctgcatttaaatttctgagaagcttccagacagttttccacagtggctgcactgtgttatattcccaccaactgcatatgagtcccaacttctccacatctttgtcgacacttgttactatctctctttttgaatatagccatcctagtggatcctagtgaatgtggagtgatgtctctttgtggctttgattggcatttccctcagggccaatgacactgtacgtcctttcctgtgcttcttggccatttggacatcttctttggagaaacatctactcagagcctttggtcattttcaatggccttatttttctttttatgattgagttgtaagagttctctatctgacctacatgtaagtcccttatcaggtgtatcatctgcatatttttctcccattgtgtagattgtctttttactttctccatggtgtcctttgaaggacaaaatgttttaatgtcaatgaaatccagtttatctattttttcttttgtcacttgtgcttttcgtgtctatttaaggaggctttgcctaactcaatctcacaacttactcctgtatttctcttctaggagtttgtatagttttagctcttacagttaagttgatgatgcatttcaagtttatttttatatatggtgtgagggaggggtccaacttcatcatttgcatgtggatgtctggttgtcccagcaccatttgtcgaacacactattctatccccattgaattatcttggcatccttgtcgaaaatcaattgactgtgaaagtgcgagtttatttccagactctccattctgtttcactgctctatatgtctatccctgtgcacgtctggtgcttttctaaccatctgccacctccagcctggctgttactctccagctatgtgactttaggcaatgagtttcacaggaagctctcctgttcagtttctcgacctttccccttaaaagaaacttaccctgggactggtgagggttcccagaggaaaagagggtacagaaggtcctgggggtaatgaaggctgagtctacttccaggaggcccagccagaaccttggatttctggagagctggattcttgctttctaagaccagattcttgaacgtgattctctggaatcccagcctggcactcccctctggaaaaagaagcaaatttccaggaccaataatcagagtgccaagaacttctctcttttcttttccactctgtcacccaggctggagtgcagtggtgcaaccatagctcactgcagcctcaacctcccaggctcaagcaatcctcctgcctcagcctccctagtagctgggactataggtgtgtgccaccatgcctggctaatttttaaaaatttttgtagacacagggtctcactctgttggtcaggctggaagaacctcttttgacttgggaagaagaatacactatacctccaagtgagctaaggagatctgagggctgagggcagacctcacccctctcagaggtctgctgatctcctgtaggcctgagcaaaacagaagtaacaccactctgcttctctgggggacagcaatgggaaagcagagttcagtttgcagaatcccctttcaagaaggctgtctgtgcacaggacagctgtgggggaagtggggcttcttccaagcaaagccgccatacaatggtgtgtatggtggtccaaggggcagggtaggtcagtggagggaggctgccagtctgagatccctgggaaatccccagaaaggcaagattcagagcctcagctacctcctttcccaggatgtctgctgggtggaaaatgatcagctccttcctctgtcttagagcctgagtggatgaaccacctgccagacttgggctaattacattaactggctccaggcgattactgtggccacagactccagggagccaggctgctgctccacaggggaagcgaggaggctgcagagggaggcatgggctggctgggatccaggccagagctgcagagaattcccagagcactgaaggggaggaggtatgaacacgagcttccacctcttaccccagaaacccccagggtctgaggaccaggctggggctactcttattccccaagcaaaagcctggacaagcccattcccaagccctctccctctgcctgcactccttcttaccagtctgggtgagtgacatgcagatgcccagcccctccaaactagaaaaggtggaggctagataatcccccactggagaatgatctctctagtaaattagcttgaccataaatggagtttaattccttagagagttgaggagtggctaagggtatgggctttggattcagacatgacttttctaccagcttctgcaactaatagtaataaaagtgtttaatgtttgcttgtttttttatttatttatttgagacagagtctcactctgtcgcctaggctggggtgcagtggtgcagtcttagctcaatgcaacctccgcctcctgagttcaagtcatccttgtgcctcagcctcctgagtagccaggattataggcgcgcactaccacgtccagctaatttttgtatttttagtagagacatgtttctccatgttggccaggctggtcttgaactcctgacctcagatgatccaactacttcggcctcccaagttgctaggattacaggtgtgagccaccgcacccggctatggttaatgtttattgagcatttactatataccagggactgttctgcttaacacctgctatatcatttataacagccttctaaggtcgattctgtgattactttatccattttacaaatgtgaaaactgaggggttataaaatgtgcccaaggacacagaactagaattcaaacccaggcaggctgcctgccaagcgcagggacccagccactatgctcccccacctctcactggaatgtggcttttgaaagtttatttcatttccctagacctcagtgtccctttttgctgaatgggggttacagtagcacctgttggggcatgaaatgtaacagacaagtgaagggctgtgtccatagctcacagtgagtgctctggaggaggaaagctgttcttacttcctacgtatttggcttcaaccctcaccctgtaaatgtcagtggagttgagggtagggtcagaactatgagaagtgacaatggccctgtgggagctctcaaagccaggcagtgacatctgtggcctcccaccctgggtgctggcaaaggtggtcaggaaagaggatgcagccagcagcccggagtccaatcacacgccctccactgtcttgctgtggcttttcctttccaagcctcagtttcctcttctggaaactgaaggtaatcatgctttttaccctatgggctgtctcaaggaatgaataagatggcacgtttgggcgtagaggaaatgcttggcccagatgctggcatcattgttaggacagggcaggaagttagaagaacagagacgataggagccaacttaggacaataaatgcagtggccggacataagaggcctttccaagcagaagccacaggacatggggaccaattggaaagatgggaacagatgtggagacacggcggacctggcactggatggagatggtcctctgagaaggttccaatgcaaccacgtgatctcactcagcagccagcgatcgcagaaaatgggccgttggggtggagaggccagggcctatggacctctacaggcctcctccctgccagccggagcttctgagaagggcagcagaatgagaagtggggggcctgagacagctggctgtgctgagctaccaaagctggctggagtgggggctgcagcccacaggactgaggcgggagtggtcaggggcccctgagctggatgtgagcatgttcagagacgggacactgtcgtcttgagtgcctggacctggtcagggagctggaggaaggacacccatgctgctcgcctgcctgccacggacctcccagccagctgaggtcaccggctgagcgccagttgagagaggggccagacagatgggtttggggctcggaggagcattttgaagctaactgggtcatctagcaagaacggtcacttcccagcatcagccccaaaggtccaagcctgctgactgcctcctggacaggcttctagaaccctccctccctccctctctgaacacagttctgcaaagaagtgcccttgaccatagcccaccctcacccaggaacaggcccagctcattccaccagctgtccctctaatccccctacagcctgcagggcagagcctgtggtgcctcagtgtgagtgcccacagaggtcaggagacatgcccactgtcccacagcagtgagtggcgctgagattggagctcaggtcttctgggaccagagcccttgacgttcccactccatgaagctgtcaggaaaacagagggacatccacctctctgagtgtgggacaatgtggtagccatatggacctctggatcaagggcctcccaacagtcctggaattcagtggggtggggatctgtatccccattttacagagaagaaaactgagtctgctaataaaaggaaggctagagtttgaatctaaatattctgattgccactctccttccgtggggatctgaggccctgagctcgggagggaagcgaggcctttgaaacctctgacccattattgtgactggatgaagcagacaacccagtcaagcagcacacagtttttggtgcatcttgtccctggggaatagagctagcagactgtcatcagcctctctccaagggaactcggagcctagagtggaaacagaccacttgctctttcgtttctcatgcttacaaatcctttgattcaagcaatatttgtgagcacctactgtgcacctgctgtggggggagcactgagagagtcccatctccctcaaggtagctatacaaattagaaattcattttgatataggacagccaggatacagtctaatagcaatgaatttttcagttataaggtaccaaatgttgctccaggcacttaaatatataaattcatttaatcctcacaatccttaggagatgggtatttctagtattcttattttaataaatgaagaaattgagacccagagaggttaagtaacttgcccaaggtcacacagtgagtaagtggcagcgtttgttttcaaaccctgattgcctagcttgggagcttctctacagcctctcaagagatggcccattgagccctcctgagccaactgaagggattcatctgcttctggaattatctaggcaggtgtctgaagccccctggggccctcaccaactccctggaccttctgtgtctcacataccagggctcccctcttgttccagagtcagatcagcttcagcctcccaggccccgccagagcaggcctgcaggtgcatcattaaaccttgacaagtgtgaggtcagtacgatgctttatcctctccacccctgggagctggatttagtggctccagcagaaggtaaacttcccctccctggaacaggccctttaattactagtgatatgtggctgttgaaactgcagtgcctcgggcccagtgatttaaggggcaggcaggaagtggaagttacaggtgttaacagctgtatcaggagctgggagagcagggatcacagcctgaggaggctatagctgcctctggaggaatgctgctcacaggcactcttagggagagagaggtgatcctactgcctcaggtacaggtacagaaagggagactgaggccaagatcacactgcaagtcggcttggtatgaagctcagcagccctgactttgctgccaacttgcagtgaatccctggactcagtttccccatctgcatatgagaagctcatgtgctgtagagaagctcccaagccaagcaatctgggtttgaaaaccaactctgaggcaggaagacttcactcactccctaggagcaataatcacaataattttcataacaaaagctagcactgattgagtgctcactgagtgccaggcattatactaagttctttaagagctttctttggtttaattctcataacagctactgaggtggtcattcttgttattcccatttttacagaagaggaaaccgaggctcagacagaagaagcaacttacccaagaccccgtgacttagggagtgaccaaatggagtgtccaagcccctctctctgaagccagagcttggcctctctgctctgggacttaaggtccagtgttggccctcaaggagtccatgaatgatgggtgagagagagaagggcacaggtttccagaattccagcagaagaaaaataaggatgatgggggaggactagggtgcaagctaagagatgaggaaggagggagtccttcctccagaggagggcatcaggaaggcttcatggaggaggtggcatggagctgggcctagcaggctggtgaagagataggacaggaggcgctgcaggcagaaggagctatataggcaacaatgaggggcagaaaagcatggcaagagggggcacccctgcatggcaggaacccaaggcatgagaaggggcagggagtaacatatcatccatcacaacagcactcaccacagcagcactcaccacagctgacatttattcatcacttggcaggtgccaggtgtgggtctacatactttacgtagtgctcacaagatccctagaaagtagatcttgtgatgatcccatttcactggtgaggaaactagccaagcgcagtgtgcctcattcctgtaatcctagcactttggaaggccgatatgggatgatctcttgagcccagaagttcaagaccagcttggacaacatagggagaccccatctcttaaaaaaaaaaccactaaattacaaatataacaaatcacacgacgaaaatgaggtgcagcagggataagtggcttgccaaggttacccagctggtaggtgtccgaagcacgatacaatcgtcagccctggccctgagcccatggaaggtccactgctgtgcccagtcctgaggaagcagtgggtggtgaggaaagggccctcgctcctccaggctgtcatggtccctgctcacccactgtccacttggcttggccacaggcagagagggaaggagagaccctgaatccagtgccatccatccattggatatggggagcccatggccaggatgcctcaagagccagatgggccaggggactctccctgcagtagcctgtgggtggggagcaggagtgagggtggagagagtacttcctagggaacaaaagtgcattcgaggtcccaatacctgggtcagggcaaggccaagggaagaggcctcaggcactgggtctctgagacaccctcactctcaatcaagccctgccaccctggccagaagttgtgttcctttgggaatgaggccttgatctgcctcaccaagctctttacaaagatgcaatccaagagatattcaatcaagcaaacgcagttcaatgttcattgcagaacctgagtgatgggtgcatgaatgttcattgtacaattacttgaactgtttggtaggtttggaaatttgcagagtccaatgtcaaggggaaaaaaaatgcatccccctcccacaaaaaaaaatacccctcccacaaaacgcccttctctacagctcctccccactcacccacctcatctcccctggaaattgctttatgaggagcaagcggcaagaatgatttacttgctctctgactcgggaaatcaatcctaaaacgctgataggacaggaaagacgtggccacagagccccccgggaaatctcccgcttgaaggaaagctctgagccaggccaggagtgcggtggggggtaggggctctgcagggagatcggcaggcgtggcccagtggtgctgggagtggtccagagactgggagtggctcagagcactgacctgtggaaacacgtgaggacttcttaccactgccacatttagaggacacgtgggcccttcgacaccttgttctgcacctctaactgtctggatgaggaaaccgagacccagggagggggaaatgacggccatgtcgcagagaaagtccacggcaacgctgagacggaatcttcagccccctgactctcggttgacaccttttcccctgacacaataataaactaaaaaagccgtaacaactagaattgcctttctgctcgctaagtggcagtacttcattccccaccctcgcatgagacagccacccgtgccatcttcattctatgggtgggggggtaggggtgggcaggaagccatcagtggactcaaggacacaccgcttctaagcagaagggctgtgacctcgagccaggtttcccaggccctaggccttcaaggccagggctaagctctgttctaagcctcagaaagccaaggcctgtacacggttttcctggaagggacagaggttttgcacgctgggggaagatgaagaggggtctccccagagcctccaagtccagcccactgctctctggggggaggacggacgagcaacagcttataaggagctggtgctctgctactggccagttcttgaatgtgcctccctacctgcctccccaagcttccgtgggcttccagaggcttctctcacaaagctgcaagtatggtacctggtgaaatcgcccgtgtgtgtaatactcacctctcagatatattgaaaacatcccccaaattggctagctttgctgctatttaaaacagattcacgttacaccccatagatttcatctctgcagacacggcacctgtcgtggggcttaaacacattctctctattgctacataaactacagagcggaggcagttgcaggcagcggccacccacaggctgcggggcaggctgcttccagccagcaaaactccaggagcagagaggatctgcatgggcctagaggcctagggggccaatcagaaaactggagacattgacaagtagccgatcaagccgtaagtggaaagttgcaccggttgtggggagtggagctttggggatttgaagtcctttgatccaatcagcgtatagggccagggaggctccagagggttctctcctgtgcccctctgctgaggcctggggtagcctggctaaggttctccaattcccccaagcctttcgttttctatcagtaatcatcttcactcctgttgactgatcacctactatgaaccaagcccttagttcacataatttagtggttcttaggaccctaatttagagatgcaccaactgaagcttacatagattaaagcagcggtccacatatttgaacttggattagaatctcaggacttgttaaaactcagggtggggactgccggaccccaccccatcccaggttgggcaggtctggaatggggatcaaggatttgcgtttctaataagctcccgggtgattcggatgctggtggtccagggaacacacttggagaaccaccaggttaagggactagtcttgaaaatagtgctataatacaaatctagatccaacacaagacgtctgtggccgcccaccacccctttctttacaggtgtgtggcattttatttctccaccagcaatagcctcagttgggtccgctctgcccggcttcactgattcactgcctagaaggctgccttccctgtctgcagcacccccagagcagccagccagagcctccagttggggctgttaattttatcttctaccactgcgaaagcacaacagctggcaggggaggggcaaggcaggtgagcgggtgcttccaggcacctccctgcagagcagaggcggtgtgggtggatgacgcccgcagccactgggatccttcatgaacccgctccactcagaacggcccccatctcagattccggcaatgacctggaccccgggccccccacccctcgccactgcaccaagcacaggagctcccatggccgctttcaagtttgggggtggggctagattcagctcagcagctgccacataaaagggcccattgcagcccatataagcacagacgcagcgtttatctctcctgtcactgatggcggctccatttgggggctttttgttgttgcttttttttttcccttggctgctgttactactcagttcaatatttaattttcccataaaccaaagagttgcacttttttttccctctctctttttcttgccggggactcccttccactggtgggatctgtctcttcgggtctctgctgggagagaggggcttaggatggggctggagatttcagcccttccaacttgggcagggattggagggaaggatgcctgggcccttccctccaatccattcactcattcacttggaaaatacgtattgagcaaatcctggtgtgccaggctcttgggtgcggccgcaggtaagaagccttccctgacctcgtgttgcttacattctagtgagggtatcggaggaaaagagatgtgtgtgaaccaatatgtgagataattatacactgtgaggtgctctgtgaagaaaatatacaaaatgctggggccccaaacaaaagagagcttagcttagattgaggggtgacatttgagctgagacttcttgaaagtcctgacaaggctcagccaggctaaaaagctgagtgaaagacttcaaacaggggaagctgcacatgcaaaggccctgtggctggaaagagctgagtgtgttcatagactcaaagagaaaaatgtctcagtgtgtttggcgcatggtgatgggagggtaagtattggtcaaggtgtaagggttggagaagggagcaaggtctacagcactgcagggtcttctggaattttcttccacagatgggctatgtgctttcctgtgctgggagaaatgaaggaaacaaacagacattgaaattgaactcctattgcatggctggtcgacactagctctgaggctaggtggaagaaagacaaagctccaacttccagggaacacgcactctagtggggagacagacgttgacccagaacagaataacaagtagcaatgagtatgaaaagcacagggtgctccaggcacccagaggacaggctctaaccctgtctggaaaaacctgggaaggctgcctggaggaggcaacatctgaggccagccttaaaggatgaggtggagttaattagcagaaggcccagtgtgtgcagggcacagaggagatgagcaaagtgaagagggaaccacaggcagctcagcattgctgaagcagggagggcttcccagaggaggtgctcttttgagcaggttcttgaaggagcagagagacaggctagtggagatgatggggaagaaactaagatgtgtggaaccaaaagaaaaaaaaaagaaagaaattaaagtagggaatatggagggacatttatattcatggacacttttatattaaaaaggtggttttcttcttttgtgaaatatggtgtaatgactaagagctgattgaaaaggaaggcagtcaatagagcaggcatgctgagaggaaagaatgggtttttttgcaaacaatataattttgaacttgtctctcccctcccccatccctcccccaagcctaattgattaccaccccatgatgaatgacactgggagccagagtgtgctaagcaccttcgtagagtggtacccaatgagctggagagattttcccttcctcgagacaatggttactcctgggagggaaagaaattcccctatacattgttctcagccaagagaggggcgtgggccattggagagataatataattaaagctttcctgtttgctcagcactttgctatccttacagaaggtttatgtttgctttcctgtttgctcagcactttgctatccttacagaaggtttatgtttattttccatttgcttctcatctcaaaaaccctggaagctgagaggctggcagggtatgtcttattgaactcatttgatagatgggaagactgatgaccacaggcatcaactgatttgcccaaagttctatgggatgttgggagcagagcctgggctagaaccttggtctgactctattagagccagcaccctgggagaagtgggagcggacctcatggaagagtatttaactctagtactcacagtttgacacaggtttggggcagatttccctctccaacaattctgagatttatatcagatcaggtttgtgttcccaaatttcaaaggccacggaatgatttacagagcaaagaggagctgctgcattgtctccgaagtgagttacaatgaccaaaataacgttctgctttcaagataaagacaggcaatatttcggagttaatttcataaaaccgatcatccaaccattacctccctgtgtcgatgttaactgttgagtctaaaataacttcaactcctgcctcccttggtggccatggaacaggagtgatggaggttggctgtgacatacagctgtgttagatgggaagccactttacctttcccgatgctagaaaaaattattcatggaaacttctagcagcaattctctccccttaaggcacagtaaaaaaaaaaactagaaagtcaactggtttgattgggggtaggggcagagatcagtggatttaagggagttttatggtggtatccttggttgatcatcatggtggacttatagaatagggtcggcctttcctactgcccaggtctggtgttacacaagtggaataatgtgtctgtaagtggtttgtaaattatgaaactctgcccatgtctagactctttttttttttttttttttttttgagacggagtttcgctcttgttacccaggctgcagtgcaatggcacagtctcggctcactgcaacctccgccttccgggttcaagcgattctcctgcctcatccttctgagtagctgggattataagcatgtgtcaccacacccagctaattgcgtatttttagtagagagacggtttctccatgttggccaggctggtcttgaactcccgacctcacgtgatccactttcctcagcctcccagagtcctgggattacgggcatcagcccctgcacctggcctagattcttactattactaatacaattacgactactgtttattcttccccaagcaaaatatgcctgcttggtgtctcttcaccttagaagggtcatttcagatgaatggtgctgatgagtgtgatgagtgtgtttactcacccacccccaccacacacaccccagagagcattgcactgccacaggcatttcagaaaacacagcctcaaagtccacaaaaatgaggcactgatggtgggagcactggacatcattgtctacaggtgataacagaagagtgggagggagattggtgagccaggggtcttcgttgatgattctttgccacctggatctcctgtgaatacagtgggacacaggcaggtggcctcaccttacactgctcattctgttacctgactttgtatttgggattattctggcccaggaagtcatgtagagttgatatctgtgttcacagctgatctcccacctttgattgaacacttcctggggcatgggatctatcccaggcataggacacataaaaagctgctggcttttgaccttggccagagactgtaacagtgatgggaatggcgatgagaatggagatggtattggggttggggatgggatggaaatagaaatgagaattgagttggagatgaggatagagatgtgatagagattaagtgtggggacaggaatagaagtggtgataggaatggaggtgggatagagatgggggaggagatggagttgaagttggtcgtgagatggagacagaaatgaggagagaataggggatggagattgaggatggggagggatggaaatggagctgaatgtgaggatagagacagagatgagaatggagatggagtggagatggggatagaaataggaatggagatgaggatggggaaggggatgtggatgaggatgggatggagatagagatagaggtggagatgggcatggggtaaagataagaatagagaaggagattgagatcgagatggggaggagattgagatggggatggggataaagatgggggaagagatggagatggagatgggagtggggttggggatgggggtagatatgggtttggagatgaagatggggttggggatggtgataaaaacagggaaggagatggagatgaagatggagtggggatgagggtggaaatggggataaagataaggaaggagatgaagatggagatggggatggggatatggatgaattggggaaagggatggggatgaggatgagggtagggatgaggatggggatgggaacggagatgagggatgaggtgggcatggggatgggaatggagatgggggatgaggtggggatggggatgggaatgaagtggaggagcaggtggagagggggagtggggtgggaataggaatataaaaagggaagcctaagtgaaggaaggcttttattgggctatgaaactggcttttattgggctatgcaggcaggaatgccgtacttggtcaagagaagggaaaaagaaaaatagaaaagaagagggcgatgctaatagtgactagaagagtgaagcatctgtcaggagccagggactcctggatggagacggctccctgactgccggcactcagagccctccaccaggagacaggaggtgagatgcagagtgacattttcctaggactcactgatgggagtatattgatggggagggtgtgggaagcctgagctgtccgtgctgatgttaacagctctgctatgtcatcgtccatacaactgaaatctgttattgtcttatgagcttgattaactgtacatattgctaatataacgagggatggaaacacagctccagtcagggtctgtgtgggtggtgcgtgtgacttaggtgcagatctccagagagagagagagagtgtgtgtgtgtgtgtgtgaatgtttaggggggtgaagggtgtaagcgccatgctgtgcaaagaatcctagccaggatttggaaggctaggggccattccaggctctgccactgacttagggtatgattgtagccaaacctgtgcttctctctgatctcagtttgcttacttataaaatggaaagtctagaccagagttgtccaagagaaatataatgtaaagtacatatgtcactgtaagttttctaataaccgcattaagataagtttaaaaaagaaaaggtgaaattgattctagtaatatatttattaaacccaatatatccaaaatattatcatgtcaatatgttatcaatatatcttacgctcttcttaaaaaattaagacttctgttttacacttacagcacatgtgaacttgaacaaaccacatttcaggtgctccccagccacatggggtgagtggctgctctacgggacagcccgaatctagggcattttctgatctcctcactaaactgtgaatgctccaaaggtacgaccatgttttattctcccagtccttagcaaggaggctcaaataagaatgttagtaaatcacactgacaataagcacagctgatatgtattgggtgcactttcaaaacactttgcaggcactacgttactgaatcttcacaagtaccttacaattccatttttcagatcaggaaaccaggctcagagaggttaagtaacttgcccaaggtcacacagccagtaagtggtacagctgatctttgaaatctggctagtctgatctagaacccacctccttagccattgtcctgtactacctcccttatttatagtcatacactaattaaaattgctaccctgcattgcaggtaacttacatgtgccatcacatttactcttcaaagcaaacctcttagaagccaggcatagtggctcacacctgtaatcccaacactttgggaggctaagttgggaggatcgtttgaggccaggaattcaagaccagcttggacaatatagcaagaccctagctctacaaaacataaaaacaaaaacaaaaacaaaacaggcgtggtggcacacaactgtggtcccagctacttgagaggccgaggcaggacaattgatcacttgagcccaggaggtcaaggctgctgtgagccatgattgtgccagttcactccagcctgggtaacagagcgagaccctgcctcaaaaaacacaaaaaaaaaagaaaaagaaaagaaagaaagagagagagagaaagagaaagaaaaagaaagaaagaaagaaagaaagaaagaaagaaagaaagaaagaaaggaaggaaggaaggaaggaaggaaggaaggaaggaaggaaggaaggaaggaaggaaaagagaaagaaagaaagaaagggaaggaaggaaggaaggaaggaaggaaggaaggaaggaaggaaggaaggaaaagcaatcctctcctctcaggaaggttctaggtgtctgatctctgtttgctcagtgaagataagaaagaatgaatgagtgattttaaaggagtcgcctgcctggttctgagcctctaggattcttggaatgtatcctgatacctattcacctgccatcacgagccatgccagagttttatgctaagctctaactgcagaggtcactgatctttggggtaactgagtaactagagccacccacagcatcagttcctgatggaatttgattataaggcatccatggaaggtaagtgaatgttcctggtggttcaaatgtgtacatacacctaaaggcaccaatagatacaagctccctttttcttcccaaaggtcgaggtggctcagcttcatgtcagaggctgggctctggagtcagactgcctgagttcaaatcctggctcttcctcatactggcaccgtgagtgagtctgagcaagttgcttcacctcttaattttccccatctgtaaaatgggaataaataaacccagcctgtagactgatggtgaagacagaaagaatgcacacatgttaagaactcagaacaggtcctgattcctaagagttagccgttgtggattcttgtgtgggatccaggttttcggttgagttttggaaaggttagattgcagaatctgcaatttctaggtaattgacgtgttctgctgtatttttcccttctcggaattcctatccggcttaccatctgttttatgcgatcttacgcttaattacaattctccaactattgttctcccattgttttctgtgtgctctgcttctcttgctgacagcatgggttggctccctgaatgaatgaatgactcatacctgatttcatttcactaggccttgaaatagagttgcccgtgtgtctgtcgcccccacctgactgtgaactttgcaatgcttcacctgtttcatcattgggcacctcctggcagcacctggcattgttcccggcacctagtaggtgtcaggaaatgtttgtcgaatttaattaaacttaactagagtgaaaaccccctgaaggaaggaaaggcccatacctctttattttctctgcttccctccctgtgcgtgtcccaaggctgggtaaatcagaactgacagcttttcccaagtgaggctctaagattctggttcctgtcctgctgattatgaggaggttagggaaataatagcagaaatcacaataatagcaaattcctaccatatgctaagcattttcatatgcattagctagttttgtcctgcaaaaatgtctgccaagtattaatattattcccatttagcaaattgggggactgaggctcacagttttggtgacttgcccaagcacgtggaggtggtggtgaccgagctgagattcagacccaggtgtgcctgatggcccagtccctgccccttgcgatgccccacggtgtctgggagcaagggttttgacaaaccagccaggggcagtgggtgaggagagaagagaggttgagtgggtgggaggggtggccaacaaaaataagccaacttccagaaaggatggaaggaaagactcctggccacaaatagctgtccagctgcccccatccaagtgtacggtaccatcctccccagctgaaattcccactctgttttcagtctcttccaaatgcaagtcagatgatgtcactgctctcactgaaaaccttcagtggctccccattgctctcaggataaagaagaaaaacccaaaacctgtgctttaaagataaatcagccctctgggggctagggcagaggaaggggggaaaaggccccaaagtatagcagttgctgttttttgtgatgtgaagatactcactgtgacaagttacaaacagttaaccgccggttcataaaattcctgaaaatgtcacaacctgctccagcatgccagttcaagtcataatccccctgacagcacaccacgtgctctgtgccctgctcatatgcccagccccgctgggcaccgcattccccctggcctgccccgctctgtcctggccaacctactgcgggctctggcacaaaaataatccaggcatggtggcacacacctgtggtcccagctacttgagaggctgggaatctcaggacttgttaaaactcaaggtgttaaaactcaaagctccttctacctgccacgctgtctcccacccactcttgtgacctcagatcacggcagcaatgtggctgcttcagcagcgtctgcccagaactcccaggctcgggcagagtcccctcaacacactgatgcctccggggatctgatgcacttcacactttgatctgtgctatctcttgattcctgtgtgtcttctacactaaactgtaagctccaggaggggagggctcttgtctatattcccagcaaggacgtgttcctcactgtagtggataccaatggcaccccctggagtttggcaacacctgccctcccccacccccggcacccagcatggacgtggcccatcttaggtcatcagtgaactcttcctgaatctcccagttgagcccttgtcttcctgtgcttccttttggggcagctcctcccacctccattgaagtggtggctgctgacacaccagcccccttcagccgctaccaagcccagaacttcacgctggtctgcatcgtgtctggaggaaaaccagcacccatggtgagtacccctggagtgcccagctccttcctatctgccggaccaccctgcttcggggctggtccagctgcaggtgtcgccactgtgcctggaaagggagtggttggccagggctgactctgtccccatctgccttggtctgatcccgtttacccattggactggtccaggcatccatgtgcccctgttgctacccatctccccatgctgagaacccccacttctcctggagacaaagtactagaacttcacagcaggagcagcctttcggggagcccaagacccagcatgcctgaccccagttattgagtcccacggagacaaatgaaagggggccccgagaggaaaaggggcttgtcccaagtcaccatggcactcctgacagagctgggtctcaagtccgtgtctcaagctccaggttcactggcattcccaggagcccacatgatcagcaggaagcccatctgaaaggagggacaggatggaagggcgagaaggaagggagaaagggagggaagagagaggaaattcctttttgaccaacttattagacccaacatagtttctttgatatttgtcagtgcagttcacgagattttttatgacctcttgaagggggtggggcaggaggtgcagcgtccagagagctggggtcctggccctgctgtactcactgaacaaccatgagcaggaaatgccccctccccacttctgcctctgtttctgcaaggaagtttagggggctggacaatatttgtttttcagcttttttagtagcacgaggacccttttggtctaaatgatatacagggaagcctcatatatatgacatttaaaagtgaagagaggccaagtcactctcattgcacctgaagcacctctgtagaacccgtaggcttccatgaaacccatttggagaaagtttgggctacgtaccctttcaattttgacattttataatactttgggtcttgatcctgtgagtttcgcacagtactaggatttagcaaggtgtggagctagagcaatgggtacataggattacagttcaagacgggagccaaatggttcccctcattccagacccaattgtctcccaggcatggtccaattgtgcggccttgggaatctaggccagccctgccttgcgacctggggcagggtggtaaatgggtctgtagaggtccaggacagggcagtaagcaggtgcacagagacacaggtggggcagctggcagggtcacagggatgcagagatacaggtgaggcagtgggcagggatgcagagacacaggtgggacagcgggcaagggcacagagacataggtgaggcagtgggcaggggagtagagacacaggtggggcagtgggcaggggcacagaggcacaggtggggcagtggacagaggtgcagaggcacagatggagcaatgggcaggggcacagaagcacaggtggggcagtgggcagaggtgccgagacacaggtggggtgatgggcaggggagtagagacacaggtgaggcggtgggtagaggtgcagaggcacaggtgggattgtgggcagaggagtagagacacaggtggggcactgggcaggggcacagagacacaggtggggtggtgggcaggggaacagagacaagcctcagtccctaggaagtggacccaaaaaggtagcttcaaagccagttgctgaaagcaggacatgaccccagattttcccctttggaggccatagacaggtccagtctccctaaaatcaggaaagctgtttttttctcacagagaaaaagtcctttcctgaaaggcacaaagaaaggcttttcacagcccaggggctgtaggaagacccctcctacccagcctgtctgcctgccccaacatttgcgacacggcaataaaatattcagatatagacatgcaaaagaacctcatctccccaaatcccaggcatcttatgtttgcctgagacatcagaactttaaagtaattctttgatataaattacaaacctgcatttaaagcacttttcaaaaagaaaaaaggaaagaagaaaataaatgggggaaaaaaaaccaacgcaggctatcatgtgcagaagagattctttgttggcattacaaactccgacaaaaatcctacatttcctacccccatcccctcccacctccttcacccccctgcagtccctccctccacacactttccttccgctcccccacctgtgtcccagagagctgcatcccactcttccctctcccgcccccctatcgatttatttatcagatttattaaaaatacatccaatcccctcaggaatctgggcacatgtaccaaaataaaaagacagcaaattaaattaaatgccgcctcacaaaacttgagttccccgttagcagagaaagtgaggagatgtttgctctcacctcatccccgcacctagcttcctcccacacatgcacctgttttctgccttccatctccaaaacgcacacgcacagagattctttcttccctcatcctctcccaacgtctcacttcatccccggtgccttccatttttccctcatccccaggacctccctgagtgggcatggaccacacccttgggccccaggtggttgccatggtgtaggccgaagtccccatttcccatgtggttccactgatgcacccaacagccccatgaagcaggtgtcttattcttctcttgacaagtgaagaaactgaggctcaaaaaacctcatcagttggtaaatgatgggattgggctaagcctctgccccaagggcctgcatgtgttcccattgtaccacactggctcatagttcttgggggtgttgaagggaaaagagtggggtgagggctactgtctagactactatgctctggaagaactggcatcctgtgcccagttcatcggagaacccactgggaggttgaagttagtagcacaaaatcattttcccacaccctccttacaatggcaggtttatttcaaacgagatggggaaccaatcgacgcagtgcccctatcagagccaccagctgcgagctccggccccctacaggacagcaggcccttccgcagccttctgcaccgtgacctggatgacaccaagatgcagaagtcactgtccctcctggacgccgagaaccggggtgggcgaccctacacggagcgcccctcccgtggcctgaccccagatcccaacatcctcctccagccaaccacagagaacataccagagacggtcgtgagccgtgagtttccccgctgggtccacagcgccgagcccacctacttcctgcgccacagccgcaccccgagcagtgacggcactgtggaagtacgtgccctgctcacctggaccctcaacccacagatcgacaacgaggccctcttcagctgcgaggtcaagcacccagctctgtcgatgcccatgcaggcagaggtcacgctgggtaagacttggtgggggcccttctgtagagcccttgcagacctgggtgtggggagagccttggaatagggttcctgggctgaggacagccatggaaagggggaggagatggagcaaactggagtcaggatgagcacaaatggtagagtcaggttcttagggaggtttgctgagctggattggagaagatgggaggtacccacaggccaaggtagtttgctgggttgagccaagaacatgagaggtcagaagagtttgctggatagggtcagggacacaggagatcaggggaggtcagaggagttcctggattagatcaggaacatgggaggtctaggaggtcttctggaagggtcagaaacaagagattgaggagatttgctgggttgggtcaggaacataagaggttggggaaaagcaagggagtcactgggctgggtcagcaacatgagaggtcagggagtttgtacagtccagataaaaaagatggaaagtcagagaaatatgctggattggtgttaaaaacaggggaggttttctaggtcaaaactggaaccaggatgtttgctgggtaaataaagtatacacaagagtcgggtttcttcaggaagggttgctgagtcaagtcagaagcataggtcagcgtgaagaccaggggaggtcaagatttttctagtcagcctcaggagcacaagagatcaggggacatttgtcggatcaaggagaggaaccttgaggtcatggcatgctcaggggagttttctacatcacaggtgggaacatgggaggtgacagggagattttctggattgcatatgagcccagtgagctcagaggacagttgctgcataagggttgcaaacctgggaggttgcaggctttgctggatcgggttcgagaattctgaaagtcataggaatttttgccaggttggggtcaggaacacataggacatggaaggatatcactccggcttacacttttaagtacaatgaaaaccctgtcatctgtgggtatgtgggaggcaggcaaagaggacactggctgcccagagacagctcagcccaagaatctaatccatgtccatgatctgcacctctccccacagagcaccaacccagggatccccaaagcagttccctggtaactcactctcttccccttatactggtcctccccactgactcagggcagggaaaggggagatgtggaatcttcgttgctgaaaatatacaagactcatctccagttgtttgtatggactgggtgggcgagggcaggggatgggcacgatgacctgtgcttgtcctttcccctatgtcctttgaaccttgatttgcagcccccagcagctcctccctgagcccgagatgcctgggctcatactccaaaactcctgtagtgtcaggggctgcctggagcagtccacagcctctaacccaggccactcatgaccaaggactgagagcagtaactgacaagaattgggactgcagcttgtgtcaggtgttctagagagcttctgtttcatctggaccatcagaaaacccaacacctcctcagtatcaaataccaaagaaaaggatttcttgtacggatagtatgtactatgtgccaggaacatctgcaaggattctcatccaatcctcacaagcacaagttggctgtgtagtctcattttgcatatgagcaaaactgaggctcaagttggtagagtactttgccaagtcgttaactttgtatgtagcggcgttgaaatttcaagccaagtttattggtgccttcttcactcactaccatgccaaccactgaactcaccagccccaggatgtggtgtcttgactggttatgggactggttccctgaagacccattacaatggacctttgatattctctctctctctcttttttttttttttttttttttgacagagtctggctctgtcacacccaggctggagtgcagtgggtgatcttggctcactgcaacctcagcctcccaggttcaagtgattctcctgcctcagtctctcaagtagctgggattacaggtgccttccaccacatcctgctaatttttttttttaatagaggtggggtttcaccatatcggccaggctggtctcaaactcccaacctcaggtgatccacctgcctcggcctccaaagtgctggggttacagacgtgagccaccgcacccagcagccttttgattttcacaggccacctgcccatacagaaactaaaaataaaggctaacatttagtgagcacctactatatgccacagactgtggcctctcttatattaacccagtgagacaggcaccattattatcccatgtcacagaggaggaagctgaggctcagggaagttaagttgcccaaggtgagtgggggagaattcaaaggctccagagtctgctctaagcctctcactctgcctcctcacggcgtccctctgtcacaggtgcccacttcctgggtactctttgttcatcattccataaagatatcacaagcagggccaggcacagtgtctcacgcctgtaatcctaacactttgggaggccaaggcgggtggatcatgaggtcaggagttcaagactagcctgactaatgtggtgaaaccccatctctactaaaaaaaaaaaatacaaaacttagctgggcttggtggtgtgtgcctataatcccagctactcaggaggctgagacaggagaatcacttgaacccaggaggcagaggctgcagtgagccgagattgcaccactgcactccagcctaggtgatagagtgagacttcatctcaaaaagaaaaaaaaaaagttggggggaaaaaagatattacaagcatcacaaggccaggccctgtactaagtgctgggatcttcccaacccagagcctgctccgacccctctcttggtcctcctgcttttccagcccttcactcctctctctggaccctccatccttccatggcctcttcctcccctgacagagcagcctccaccctttacctggttgcttcatttatgaaagccccctcctgcccctcttgtggaagctctggcttccagcggggtggcacccttgccccaccccaccaagaataaggaggagaaagatgaaaggccagatacagacttcaaggcagctggtgaaaagtgagcttgtagctgacatcttctagtgatgagagggggtgtgcctctgctggcctgtgtgacccctatcaacagcaccccaaaccacattaaagcacttgcctgctctgtcctggatcccaggccctcccttaactggagccgcctctgtgggcacccccactcatcatcagagcaagagaaagaagggcccactcataagcagtgggcctggacaggcaggtctgcacacaccgggggatttggggcatgggggacacagcagggccaccaagatgaagggccctaattgggtgggtgagtaaagagacacctgggctgacttcctagcctccctcgactgctgagtgagaattcagacttcttaacgtctctgagtctcagttttctgacctgatgaagggggagaatagtaactgcacaaatgttttgagcacctactcagagccaggctctctgcaagatgctttcctcaccaggtctcctttaaacctgcagtgaacctgtgaggccgctgagagttgctatcatattattcccatctgagaggtgagggactcaggtttagagtaacctttcttaggtcagccagccaaggctgtctggccccagatctcacattcttaaccactgtgctctacagcccacctgtcagggctgtggtgagacgtcactgagccaggggatatgaccagtggaatgtgccatgagccaaagagtcgtgagtgtatgcaccttgcaccatcagggcaccctgcactctgggtgagacagtgggacggattagatgacctcagagcacaaaatccaatcattcaacaaggattttgaagatcaggccaacgagggtgggatgtgtctccctgcaatgagccttcgctcctcctcttcccttgcagggatgccctccgcagctgaaatgccacccctccaggaagatttctctgactctcccccaaccctttgagctgtttgtgcctcttctcagttcttgtctcaccagatttgtacctttctcgtaatctggaccacagatgcctgagcgtcctggcacccatctcactaaatggcaaccatgtccttcccattgatcaaaccagaagccttgcagacccctcaccttttccactcttccctcctatcccacatgcaaaccatcattaagccctggcagctcaacttcagaatatatcccaaatctgccactcctcacggtctcctctccaaatacccaacccaagcaccatcagttcaagcctgggttattagagtagccttcaaactgatcgttctgcttccactttcaccctatcctatttcccaccccgattgatctacttaaaatataaatcagatcatgacacccgcccaaaaccttcctgtggtagacaaatagattgacaaaacaggatagagtccagaaatagatctacatacacagagttcattgatttttgccaaagacccccaaggcggttcaatcaggaaagagaagttctcttaaaaaatgaccctgaaacaaatgaataggcataaggaaaaattaaacctggacccctgcctcgcacacacacaaaaattaatttgaaatgaatcatagatttaaaagtagaagtcagcatcatgaagcctctagaacaaaacatagcctttgtgatatttgtgtaacaaaggtttcttaaagtggtcacaaaataaaaactaaataaaaactaaatgataaattgaatttggtaaattggacttaatcaaaaattaaatcttctgctcttacaaagatatccttgagaaaaaagaaaagcaaactatagaatgagagaaaatactctcaatacatatatctgacaaagcatttgtaaccagaatatataaagaactatgacaaatcaataatgaaagactacccaattttttaaaaaagaaaatatacaaatggctaataaacatgtaaaaacctacactacattattagttattagagaaatgaagattccaacctccatgagataccatttcacatctattagagtggctaaaattttaaaaactgacaataccagatgttgacaagaaggtagaacaatcagaattctcatgctttgctgactgcagaataaaatggtactactactttgaaaaactggcagtttcttacaaagataaaaatatttctgttcttatgacccaacgatttcactcctaggtatttacccaagagaaatgaaaacatatgtccacagcagctttattcatggcaacagcaaaaacaacagaactgtaaataatctaaatgtccataattagaaaaatgaataaacgtatttgtagtatattcatataacaaaatactttttatcaatacaaatgaatgaactcatgatacctgcattagcatggatggagctcaaaaacatgttgatcaggctgggcacggtggcttacacttgcaatctcagaactttgggaggccgaggcaggtggatcacttgcagccgggagtttgagaccagcctggccaacatggtgaaacctcggctctactgaaaatacaaaaattagctgggtatggtagctcatgcctgtaggcccaactacttgggaggctgaggcaggagaatcccttgaacctgggaggtggaggttgcagtgagctgagattgcgccactgcactccagcctaggcaatagagtaagactccatttcaaaaaaaaaaaaaaatgttgatcaaaagaagccagatgacagagtactcactgtgtgagtccatttatttgaaattctagaacaaaaaataaatatccattgatagaaatgggaacagtgttggcctatgaagaatggaaattgactggaaggaggcctctgctcgagtcctctactcagagggtccttccttgaacactctatctaaagcagcctcttcctcctggttccttccaccccttctcttgctttgttttcttacataactcatttccacctacaagtatattctatatttgcttattgtctgaatcgcccacaaggtaggaattgagatttggttttagatgtaatggcagtcaggtgaactggcttgaacaattcattcttcatatatgttttaactgtgataaaatttacatattgggaaatgcaggtccttcagtgcacaatttgacagattttaataaatgtgaatgctggtgtaaccaccacctcaaccaaactctgcgcattcccatcacccactagaatttaaatggcacatgggcagggtcttctttatccgcctagttcacagagtacagggctcagaacaaccccaacatagttcttaataaacaactgtttaatagttaattaattaatgcttttctaggttgttgagaagattaagtaaggcagtgcatacaaagtgcttatagtgacaggcagaggaaatattcaggaaatataagctactgttattattcatcatagtatccccaacagtgaccgggaatagtgaccaccacaaattaggtgtacaataaagaattagatggatagagcaaatgaagaaatggatgggtaagcaaattggtaggtttatgggtaggcacttggatggattgttggatgtttgaatagatgaatgaataaaatgaatgcttggatggatggaaggatggatggatggatggatggatggatggatggatggatgttttgatggatggatggatatttggatggatgtttggagggatggatgaatgggtggatgtttggatggatggatagatggatggatggatggatggatgtttggatgggtggatggagggatggatggatgagtgtttagatgggtggatggagggatggatggatgagtgtttagatggatgaatggatggatggatgaatggatgtttggatagatgtttggagggatggatgaatagatggatgtttggaaggatggatatttggatggatggatggatggatggatggatggatggatggatgggtggatggatggatggatggatggatgagtgggtgaatgggtgagtgattgtcttagaaagcatccagaattcctaggggaaacttagaggagcttttccttgagattccacagtactatccttgcatcaggatgctcaggacaggtaaggaaggcaacttatatgtccaggatctttttcattccctgagcagatagacatcactttacatttcacattgcagtcttatctccctcctccattgtcattttcagagtatttcctcaagcagggtggtagcctattctccccatttacaagttagaaaactgaagcccaacaagttgaaatgactcatccaagtcatgcagccagaaagtagagggctaggtgtcaatcctgggtctctggactcctgctctttctctacgtccagggcttgagaggcaggaaagtccggagactaagagcattcctttcgggcactctcagccattgtggtctagaagcaggcaagggggtgtaggttttgattgtctggagctgctaatgggccaggctcggagtgtcaggaggctgagggtggaaggagtgaggaggctgacagcagcaggcttggcttccagaagcaacatctcaacacagcagtaaaagagggagtcagggaccatcggctgcaaacgcacttgtctagtggcagctgccaggatagagcttgaaagcagcgagggaggaccagacccctcttctgcccaccctctgtgcccctcaggatcagatgcacacaggagcccaggagccggggtgccctgggtggaagaaggcacccatctctgccccacctccacccttgggctctgagactccctctgaagccctatgtgctatcacgtcttgttactggtacttcctatagcatgaccttggacaagccactgcccccctggagggccagttctatgacctgcacaatgggtttcgtgataacctgcctcgtaagtaccagaatggtgtgactgtcctaaaatgcctaaaatggagtctagcgcatgtttgacacctgagaaaagttggttccttcttcccttagaaccagcaggcccaggcccgggcctgaaggagtaaggcaagccctttagaaagcagggcagtgaggaatctaacctagaagggaaaggtgtctgcccctgccctccagggctctagccttctccaggaccgggatgcccttcagcgccctctcctggctgcagccaacaatgccgccccagcagcacctgaagaacgtaaagagcccccaagattacccaggggcagactgccctaggcctggtttcccatctgcaaaacgatgtctacagcacttgagggttcattttaaaacccagaaacttacttgggctccctgagccttcatttccttatggcgacaatctcaaaggctggaaggctaaatgagattatgcatatggcacttcatgtaggtcctggctcttaggactcgctaaacaaatgttagccatcaaacctgccactgcctgatgttcctaacggccccgcgtgttaggcaaggggtatcattgttcccatggtgcacttgggaatgcgaaggggagccactcatccaagggcgcaaagaacagattagaactcagctcgcaggtatcccaggccagtggcccttccacacgactggctggcagatgcagctgtagaaccagcccttcccttcccagcgattccctctccttggtgcaagccctgctcttcccacggatgcttccctagacccatgtggcatttcagatgtcttgcttatggtttaattaatagtcctttgatttcattctcagagaatgaaattggcagtgcctgggaggccacccacatctgccaactgctctgatttccgttctaagagctttgcgtcagaaagagaggtccggggaccagcaaggaaaggtgggggtaatcccagggcagccccagggcctcaggacaaaccttttccacccttagaagatgtttacacagagtagcacaaagcatagagtaccaaacaaaaccctcaccccttcctccggccctggaaactcaatgggatctgtctcccaacccccttccctccctgacctgcctctgtcccatgccctggctgttccctgtgcctggaatatgcctcgtgagcttcacagctcagcttaaatgtcacctccttggaagaggcaccctgaccactatctgaggatttcacccaccaattctgagccccctcccttggtctagtgatctgcatggagcactgtcactctcatcctgttttgcgtatgtgtttgtttgcttatgaactctcacccctactgaagtgggagctccatgtcagcaggcactgggtcttgttcaccaccatatcctcagctctgctccaaatggctggctccataattactgttgagtgagtgagtgagtgaatgaatgaatctgggggaaagagtgctggcgagaaggtcaggaaacatggttaactggctctgtgagtgaccttggataagcctctacattatccgtggagctctgtttgtcagctgaaatgaagggaacagacccaatgatcccgagtggctcctccatccctgatattctcaggtgtcgttcagaggatagccatgcctttgggcatcttggctttcaagctcagagatacaaagggactgaataagaggtgatacaagaaagtgaggaagagaggcagggaggctgtgcacaaggaaggaggtggtctttcttcccacaccatgtccacccctacccagaggttctagaaaaatcccactgggaagattaacctgttagaaagagcactgactcaggagtaggagacccgcaccttgatcttggctctcctcaaggtgtgacctttggcaaatcacttcatgaccctctgaggcccagttaactcaactggacaatggggctgatgacaccagaaacgcacctcccaagggggtagcgtgggtgggagttgggggtacctcaagtctggctgctggtgcaggctgctccccctcagcagcctagtagcacgtgccccaggtacgtttccctccctgaccccactgtccactgggcctctctgatcttgtccctcatggcactggcttgtacttgtctgttgtttgtctttcttccccactgatgtgtgaaccccccaagagcaggaatcatgtcctatatacacccttgactccccaggtcctagagagcatctgattcattgcatgggcttagggaatatgtctgaatgaatgcagctgtgaatgagtgaatgaatgaatgagcacactgagcttctcacagaagcagctgatcccaaggatgttgattgctagactagaactttctcttccatgtaccctgtccctcctttccttactctctctgacctggcctttctctccctacagttgcccccaaaggacccaaaattgtgatgacgcccagcagagcccgggtaggggacacagtgaggattctggtccatgggtttcaggtcagcctctctctgagcatctgggagggtggtgggaggtggtagaggcaccgacccagcaccagcattcctggcagtcctctctaacactcttcctttgatccccagccacatccagtgggtttcagtttcccaatgtgtaattgggagaatcagctcccatgaggaatggcaaagaggtgcatgcatgtttcacaccttctagaactcagagtaaacctagctcttcaacgagacattctcttaagtcccagactcctcctcctcctggagttcagggcagccactcctaacccgtcggatgagaatgctgtgccacccctggccaggcagcccctgaccccttgctgatctggcagaatgggccctcctgtgacccacctctcccctgatctggccaacagaacgaagtcttcccggagcccatgttcacgtggacgcgggttgggagccgcctcctggacggcagcgctgagttcgacgggaaggagctggtgctggagcgggttcccgccgagctcaatggctccatgtatcgctgcaccgcccagaacccactgggctccaccgacacgcacacccggctcatcgtgtttggtatggcgcgctcaactggggactgggagaacaaccacaggggcgggtcctgtctgggaggtttccccaggaggaagaagcagtaggggcccaaaattttgggcctaaatctcccaaatttgccctgagagggtgccccactgggaggcagggtcgctcagtggttacaactataaatcagcttcggactcagaaagaaccttaggcaaactgcttaacctctctcactttctccatctgcaaaatggggctgatactatccagctcccctgaaggttgtgtggctgcactgagacagtgcgtgtgatacctcacagcaggtgctgggtaaagggccattccttccctgagctctgaaggccatccaccctttggttctctttctgtttctttccaacagaaaacccaaatatcccaagaggaacggaggactctaatggtaagtctctaccctcaggattttttgcttaaaagggagtggcttttgaggcgccagaaagctctggtcccccaaacttcccatatgcacacccttgccactccctgacacctcaggcaggtcattgccctctagtagggcagagtcagggtccaaagtgggcagaggtgggtactgaggcaataaaaagggactcagcctgccaaagcagccagctgagatttccagggccaactctgccccatctcaccatccatggcatctctggccctcttagctcagagcttgatctcactgcccatggcatctctagctttcttagctcagagcttggctgccctgacctcagaagggtgtgtccagcctcgaccgtggggctgcgttctgagactccagaccactccgtagggtggttgggagcatcaacggatgtctcagtgcaggccctttatactgtcctccctgggcatcccccaacctgctctagcctgagcaccaccccagggggcccagacgctgctcccaggcctgccacaccccctccctacatggagccaatctcacagttcacaatggaggctcccactcttggtcctcactgcaccatcctcatggcctctaggaaatctgaccgtagcccagcaagcctagtggtaggggaggagatcatggacagttaggtggccaggtggcagagctgggcttcgaacccagtttgtcctgatgctgaaatccagcgtctttgttggggacctggaggctctgctgttctggaacggggttgggtctgcaggctctgaccctttccctgattcctggcacaggttccattggccccactggtgcccggctcaccttggtgctcgccctgacagtgattctggagctgacgtgaaggcacccgccccggccactccatcaggcactgacatctccacgaccggttttcatttcttttctaaactatttccagtcttgttcttagtctctttccatctgtgtcttggcttcttcagtcggtttaattaaaacaaacagaacaattttccccacctcggtttgtggctctgcattctttatctgttcagtagcagcaactgggcccctcctcctggcattcagcattgggacaggcactgagaggggaatggcaagggaaatggaaggcatgctcttcccaaatgaacagtggacatggagctcactatctcactcaagtcctagcatccaggcgtggaatgtggccagagacgagaaatccaaattcctcagggctgagtataatagtcagctattgatacaataatgctgcataacaaaccaacccaaacctcagtggcatgcaacaacaagcacttgtaactatgttcatgttcaggctgaagtggttcagctgatctaatctgggctcagctgggcagttctgcttcaggcagcaggtcaactgggctggactccaagctgtgggttgggttcaggcctcctccatgggttggtttgctccatgggtgtttatctggggcccacactaaagaagtgactacctgacatttgatcctcttatggtagaccacaaaagctcaagaagaaactcaaaccattcaagtatgtttaaggcctctgcctgtgtcatgtccatgaacactcctttagccaaagcaagtcacatggccaaggctgacatcagtcaaggtcacatgtatgtcagtggtacaggtttctcagaactttctactcaaacattacaaattcatcacgccattcagctattaactcagagagaagggccgagagtctttggagaggggggggtttggcctctctgagccatggtcaagacttgggattcaccaagaagagcccatggaagattgtaagcagtctggatagggtaggtcctactgcagtaacatattgagcccagattcttactgccttaacacagttgatgtggtttggacctgtgtccccacgatatctcatagtgaaatgtaatccccagtgttggaagtgtggcctggtgggcggtgttaggatcatgtgggcagatccctcatgaatggcttagtgccatctctttggtgatgagtgagtgagttctcatgagatctggttgtttaaaagtgtgtagcacctccccactcccaactgactctctctcttgctcctgcttttgccatgtgacttgactgctcctgctttccttcttgccacaagtaaaagctccctgagtcctccccagaagctgagcagatgctggcagcatgcttcctatacagactgcagaaccatgagataattaaacctcttttctttataaattacccagtctcaggaatttctttatagcaatgcaagaacagcctaagccaacaataaagatttattttgggctcatgagaagcccaagtaggttaaacaggcctgttccatcttgtagctacatcacctggaatacgtggcttccaaaatccccaggggaggagaagagaaggctggagtatcactgtggtaggcagaataatgccctctcaccaaagatgtccatatcc

SEQ ID NO: 280 - DNA, 22755 bp, Homo sapiens
  source 1..22755: mol_type = genomic DNA
atttgtgatctttcacaaaatgaaaactgctggaaagtaaatattttccttcccacttccaaggtaatccgggggggtggtgaggaagagagaagctgccatgttaccagacagtggaaaatactttgttgaataacatacagaactaagtctggtaccatgtcacctcatataggaatggatgctgaaatgagacagactgagtatttctatgaaaccctcataatgatactctcttaaaagcctcccacgcttccttttttccaataaaaaataagcagtatttgagtactgaaacctttattcccattttactggaaacaaagaacatgaacaatttactagtcagaaaaaaagtgttttataacccaaaacaaatatttgccaagagctgtaaattgcttaaatcgcttaaactggagatttcagtgagatttttagcagtagattactaagctccttagttatagaacattcaatgcataggaaagtgtttttcctacaaagcataactgaaatgtagtttaactaatggtttacaattcagtcaaataccaaagctgcaaaccatttagggagtcatcaattacatattttgtacactttcaaaaagcttacagctgggatgggttgtttattttcaaagcatgactgctttaaaatgatcatattctttagcctgccacctaggaagcattaagcatttacttgcagaatgaacaaacgagcacgttgtcttgtgttatgaagtatataatatagttcgttttagtttcttcattcgcagactatcaggctcatttcacgtgactgcttgcacttagaactgagttatcacggagtaggaactctccaacatcgtcgtcatagaccaagagatgcccatgaacagccatgaaagtgccagtcagggaagtattcagtgctttgttgtagagttgttggatagaggcacaggatcatttcatgttgttgaggagaaaggagcaacagcctcctcccaccttattaaaaatagagatttaaaaaaacctctaatttcctcgaagtacagaatctcaagaggtagctctaaggagaatccctctgggtttgagcgcattcctcttccagggggcctattcttggactgctttccttaatagagaaatctctctgagccaaaatcggcctcccccaattccatcctgtcggccccacttttctgcttcggagacttccaagccagtccccactcctccttcagccagtcgggcccgcacccgcgcccggcagggccagccctctcctcctcctgcgtggcgcagcacaggccctgagcgcgcgaccccaggccctgggcgccccgccgcatgctcgcggctggaagccccagtttgcgtggcccttcgggttattccgctcaagagccgccgcgtcgccccatctcggcgcgaatctgaaagcgctttcgggggagaagatgttgggggcactggtgagtacactgcacaagtgacaaaatgttttcagctcctggaggcgaaaggtgcagagtcgctctgtgtccgtgaggccgggcggcgacctcgctcagtcggcttctcggtccgagtccccgggtacgaggaaagaccacagggggcttctcgcggaaaagcgggccgcggaccctgcgcgggctggctggggcgggcggatgacgaggcgcaggggcaagggtgggtctgcgaggcggcgggtccgggcgtcttaggctccggggctccctcgctggcggcggagcagggatggcgcgcccgggggtgagggtgcggcgggtcacaagcactcgcagcccgcggcgcagcaacccggcaggcacacgcacacgtgcacgcgcgccccgcacccgccccccgtgcggcccccggctcggggcggcggcggcggcgggggccgggggcgcgcgggccggcgccgggctgggccccggggaccccgcgggcggcgggcaggcggggagggcgctctggggcccgcccgcgcggctcccatcctccgggccggcctctggctccgcggggcgaggggaggcgcccgccggctccgggcgccgcgggcgggacacgggcgcggggcgcaggcgggctcctccggcgcgtgcggacgctgagcgtggcctgtccctcaggtctggatgctggtagccggcttcctgctggcgctgccgccgagctgggccgcgggcgccccgagggcgggcaggcgccccgcgcggccgcggggctgcgcggaccggccggaggagctactggagcagctgtacgggcgcctggcggccggcgtgctcagtgccttccaccacacgctgcagctggggccgcgtgagcaggcgcgcaacgcgagctgcccggcagggggcaggcccgccgaccgccgcttccggccgcccaccaacctgcgcagcgtgtcgccctgggcctacaggtgagccgcgggcgcgtcctggcggggcccggcaggtggggagggcagggctgggcggggagagtgggtggggccgggccgaggccgggcaggcggggagggtggggcggggaaggggaggtggttggggcggggcgacgcggagggggcgtggcacgcggggcgaggcggagcaggtaggggtggggtggtgcggggcgagacagggtagggtacggtagggtggggtggggtgcgaggggcgctgcgatgaggcggggtggggcggggcagttggagcactggggggcaattcctaaactgcgaaggcccacccccaccacctcccttgaaggagtcctgcttcctctctttaccctccagtatttcctatgcaacacgtatctcttgaacacctcatctcctccaggttggatgggtccgcaaggcactagctggggacccttccgtgatgtggacacagtgatgtggaccgtactctgcacagggggcccggggaggtgctgctggggggtgcgcggtactatccacatatttcctgagtgcccctgtggtccagaggctgctggagtggagccctgggaagcgccctctgagcccctctagtttaatagcctaaggaaggagtggggataattgggaaagaaaccacaccatcaggcagtgcatgaagtgacatgaacagtttcgagagtattttggtcttggaacagaggtcatttcagaagaaagggacagcctgcagaaggggaaggctggagaagttgggggcgtgtaggcagggtgccgcagtgtcctcagcaggcacctgtgaccgtcttccctctagctggagcaggaggagctgccctagggggcaaggcctcccagggccacagaggtcaagaaaggcttcgtgaaagagctgagtcttgatggaggagagcaagtcgcctacaaaggcagtgctgagggaagggacagctgatagcaagcgggaacaaagcgcttggaaaatggggagagccacaaggcgagcgggggcggtgggggtgggggggcgtaggcgaggtgtttgcctgtggggtgggcatcgatgtaaggctggagacaggtgcaggagctggatccccgccttgtcagcagtgcagagcttcaccctcacgcctggaatcccagcactttgggaggccgaggcaggaggatttaagtccaggagttcgagaccagcctgggaaacatagcgagatcccatttctgcaaacaatttttaaggattagcgaagtgtggtggcacgtgcctgtggtcccagctactccagaggcttaagtgggaggatagattgagcccgggaggttcaggctgcagtgagctgtggtggcgccactgccttccaacctgcgtgacaaagcgagaccccgtctctaaaataaaaattaaagagaaaaaaagtcttgacacttgagatggaggaagccatacagccactctggtttaggagggtgtcccaatggggcatggattggacaatgctctccagcacttccatccaaaggatctagggcttcactcaggcagcgcggtgggaaggggagactaggatcagcgtgaaagatgctcattaaagaagacaagtgctgtggagagtcagaggaaatgtgatgattttgtctaaaacgcatctgggctttcctggagcctctccctgccggctgctgggtagggagatttccttttactcaacaacacacaggacccctatgctgtcctgggaagccaagttttagggcctcctgcctcctggctactctgcagaggaccaagctcactgtggcagagccccctcagagcccctgcccacggggaagttgggtgggacccctcccgcccttctcactcctgtccttcagctggagcctgcagggcacacacatggcgccattcattctggtatcttggtgctcttgcttttcctctctcttcctccatttccaggacctgaagggatggactacggcattcttctttctctaacctcgtgttatgcttctgatataccaaataggattaaagccacataaggaatctctcagaaccagagattaacttctctggacagaagctgctggccctgctttctatagcagattcgaactctcaggcaaacccgtggctccccacaggctgggccaagggcctaagagtagtatatagcctcccaaaggcatgtctctcatgtttctggcttgggttgttgatggtatttgagcaaaatgagaaaatacacttaggaacaagtgttgtgggaggaaataatgaatttagtaacaagcctgttgagttttgcctgcctgaaaggcgtacaggtgacaatgactggttggagctcaggagacagagcagggctggaggacacatggagagttagcagcactggcattctgtgtgtgggaagttaaattgagttgcccttgctacagatgacacctatgtcgccccaggcaggatctgggagccgagggaggttatggatgagaatgacacacagggttcggggatcgtggtctgggccacccagatctgcccacatgtggaacctcagtgctgggtggtcccaggagcaggagtggcagctgcagcagggtggctgaaggtgtcatgtgcatcatttttcatattatttagcaacagtgatgagatcactccccatgggcaaacggaggtgggtggcttatatttgctgaaggaaggacagtcttcaggggatggctgctgggctgggactccagattgctgactgccaaagctgctcctgcattttcctgccaggagagccctctctgccctcctccctccaatcacctctcaccatcttttgggttattgggaagattagaaaaagtgagacccagccaggcccagtggctcacctgtaaatccccggctactcaggaggcggaggtgggaggatcacttgagcccaggagtttgagaccagcctgggcaacatagtatgagacttatcactacaaaaaaaacagccaggtgtggtcatgtttgcctgtggtcccagctacttgggaagtttgagccagggaggctgaggctgtagtgaactatgattgtgcctctgcactccggcctgggcaacagagtgagaacttgtctcaaaaaaaaaaaaaaaaaaaaaaaaaggaaaagaaatagtgagccaatggaagtgtggagcctctactaaaagatgttgtggaaggacaggttttttcttttagacagaatctcgctctgccacccagcctggagtgcagtgacacagacagatcaatgcagccttgaccttctaggctcaagggatcctcctacctcagcctcccatgtagctgagaccacaggtgcgcaccaccacatgcagctagtttttttgttttgttttttagagatgggggcctcactttgttgcccaggttcgtcttgaagtcctgggctccagtgaccctcctgtctcagcctctcatagtgctgggattacaggcgtaagccatggtgccaggccagggcttgttccttggtggagtgtctgagggtggggcctgggtagaggagtgcccacctgcaggctgggcacagggtcaggtggtatttctttctttctttcttttgagacagggttttgctctgtcacccaggctggaatgcagtggcatgatcttggcagactacaacctccatctcctgggttcaagcaattctcctgtctcagcttctggagtagctgggattacaggtgcatgccaccacgcccagctaatttttgtatttttagtagagacagggtttcgccatgttggccaggctggtctcgaactcctggcctcaagtgatctgcctgccttggcttcctaaagtgctgggattacaggcccaagccaccacgccctaaaggcacagcagtcagagagaatgctgagaaagacagatagggagatggactgaacgtcaggagtactgatgggcacagcaaggatcactttaggtggataagttttacaataggcatttggaaggtggctttccatacggatggaatggagacctgggtcattcagtaaatggtgttgggacagcctgggcctcactcctctgtgaaaatgaattccagatgaatcaaacatttaaatgtaaaaaaaccacaaaagcagagaaaaacacaagcaattatatttataatcttggagtggaggaggccctatttagctgctcacagtccccaaaagtcacagaagacaagattgagaaatgaagttacataattacacaccatttcttcttggtaaagtaaaataagaaaaatacaagggcaaactgggaaaaaatgtttgcaacccaagtcacaaagagctcattcctaaagagctcccacaaatcagtaagaaaaggaccagtgacggccgggtgcggtggctcacgcctgtaatcccagcactttgggaggccgaggcaggaggatcatgaggtcaggagatcgagaccatcctggctaacatggtgaaaccccatctctactaaaaatacaaaaaaaaaaaaaaaaattagccaggagtggtggtgggcaccaggaggcagagcttgcagtgagctgagattgtaccactgcactccagcctggatgacagagcgagactctgtctcaaaaaaaaaaaaaaaaaagaaagaaagaaaagaaaaggaccagtgacatcatggaaagatgagcaaagatcgggactgttcccggggaaggaaggtcaaatgactcaaacgcttgacacagaaagcaacgctagcatcaggcatcagtgaagtgcatgtggagactatactaagaagccctttttttttttttttttcctggcacccagcaggctacgttggcaaggttgtgaaggaaaggcattctcatccaagtacaggggtatgaatcagcacagcttttatggagggcgatttggtgttaaatatcaagattttaaattcacacaccctttaacttagcatttccccttcagacacacttgcccacgtgccaaatgatatgtgtacaaggatatgtgttcactgctgcaatggcaagagattggaagctacctaaacatccaccaacaggcaccgagttagatattatacactataaggaagaatgaggcagctctaaaagtcataagtggatcaatcactcaccaatacaaagcggggaaaggggtatatagcatgctgccatttctacgttaaaagggaaaatatgacgtaatatgtacatatgacacattctgtgttcagcgcctacacatacacgcacacaggcatccttagaacgtgggttctgtgtgcgtcttatgagggtctctggaggctggagttggggaggagacctactttttactcttgtatctgttaaagttttctgccatgtgcacatattccttatttcaaagacatgttagtttttaagttgagagcagaaagggaatttctccaaccacgagaaaaaagcagatactgaggaaatgaagcttcagcacaaacaacagcctgggacataccaagggcattggttgaagggcaccgtttgctcttaaaggctctggggcttcctgaagaggcactgcagacatctggatggattttcagagttcctgcgactccatggctggtttgtgctcctggtgaggagcccagacctggaaagatgaaggtattggccccaggtgacagacaggaaatagtagagccaggagtcatcctggacctctctggttccgtctagcccaagtcccacccagtgtgctgttagaaaacaacattcagcttccagaatacaaaaatattttttcacttactttgtggcataatgtttgtttctctttagctttaaaaacaaaaatgccaaaaataaagtcaattgggttgctcagcaagtttttaaaagtcagattgatatattaagaaatatgttgtaagaacactgaggtttattgaagtttaagatatacgtcattcatttatgatgaaaccccaaagacaggctgggcgcagtggctcacacctgtaatcccagcgctttgggaggccgaggtgggtggatcacctgaggtcaggagttcaagaccagcctgagcaacatggagaaaccccatctctactaaaaaaaaaaaaaaaaaaaaatacgaaattagccgggcatggtggcacatgcctgtaatcccagctacttgggaggctgaggcaggagaatcacttgaacctgggaggcggaggttgcggtgagctgagatcgcgccactgcactccagcctgggcaacaaaagcaaaactctgtctaaaaaaaaaaaaaaaaaaaaaaaagaaaccccaaagataaacacctaccagtacagtactctgaatattttttaacagcttatgttttccaatttttggtagtcgtctaaagataacttttctctaggttatgaataatgtgcaataatttatttttaggccttgttactttcttctttaactcctttcctctggacaatttaagaaactacacctaatttattttacagtaaacaactctatggatagctgtagtcgggaggtaaacaaagaaaaggacaaggagtgtcctaggctattttctgctgccatcacagataccacagagcgggtaatttataaagagtacaagttggccaggcgtggtggctcacgcctgtaatcccagcactttgggaggctgaggtgggtggatcatttgaggtcaggaattcaagaccagcctgaccaacacggagaaaccccagctctactacaaatacaaaattagctgagcgtggtggcacacacctgtaatcccagctactcgggaggctgaggcaggagaatcacttgaactggggaggtggaggttgcagtgagctgagatcatgccattgcactccagtctgagcaacaagagtgaaactctgtctcaaaaaaagaaaaaaaaaagtacaagttgatttggctcatggctctggaggctggaaagcccaagggtctggtgctggcatctggtgagagtcgtcccacgctggaaggtggaagcaagtgacagagagggaagggcggaactcatccttttaccaggaacccctccaaggatggcagagccctcctgacccagtcacctcttcaaggccccgcctcccacactgttaccatggcaactgagtttttaacacatgagctgttggagggacacagaccatagcagagagtaaaggagagtagggagaacaggggacaggaggtcaagtaactttcaaatagacaccctaggtcaccaacggcattcgaagaggccatgagaccctccccagcagcccagtgcaggtacggttcaggtaccccggctgaaggaagccggtattttcctgtggagaacccaagtaccagaatttcagcagatgacattggggaagaggggaaatcacaagaaaataaattcccttcagggatttcatttgaaaagcgccaccttgggatacagatgtgggatacagactggaagtcacctgaatgaccgcctataggcagctagtcagataaaatgctatacagctgtgaagactggcggctctcagtgtacctaaggatatcccctacttactaaatgtgcccaagttcagcttccagttacctgtgggcagttcagcaatggcccattcactgcgacctgtttcccatgtgggctgtccattaattattccacttgaccgatattgaaacccagggtcacattcattcatcaaatattgtctaggggctggtgggcaggccccctggaatacagccaggaaccacagaccctgacactcctcctgcagtcacaaggtactgttcgcatcactttctctccatcaaatcttttttaaaaaatttatctaaggggttataacattagagaaagattaggagtataatgttagagaaagttatcctcactacagctatccttcttgttaagacaccaggccgggtgcagtggctcatgcctgtaatcccagcactttgggaggccaaggcgggtggatcatatgaggtcaggagttcaagaccagcctgaccaacatggtgaaacccccatctctactaaaaatacaaaattagccgggtgtggtggcgcacacctgtaatcccagctactcaggaggctaaggccaagagaatcgcttgaacccggaaggcggaggttgcggtgagccgagatcgcgccgttgcactccagcctgggtgacagagcaaaactacgtctcaaaaacaaactcccatttatcctctacccctttaacaaatgcatgtctctcttttatgcactttcaaatgtgtgtgccgacgctaaaaaaaaaaaaaaaccccaccctgcaggctgagacccctgtggtacgcgcgtccccactgtcttgagcaccggctggcgaaggtgtctgcagcggcgtctctggccgacagggggcagcacggcgccagcgtcctcgcccagcgcactggctgcccgggccggcccaccgcgtggtctgtggaatttggggatgggaggtgcttttctttcttctctttctttctcttttttcttttttcctttcttttctttccttccttcctccctcccttctttccttcctctctccctccctcccttctttccttccttccttcctccctccctccctctttcttttttataacgtttttccttgggtccctgcttccaaactgtgggttattttctaatgtcttaaagcaaactaagccacgccttcacggagtctctgcacatagtacatgagcacaggtgcagtgtcctttcgccgccatcctctaatgacaacgctttgttgagaaaacgagggcgttagagaaaggaagagtgaaggacagagggctctgctgcctggctgggaaggtctcagtcacagcctgtgagacggccggcgggacattgttcatcctcattcattcttggagaaaaagagaaactcattgtttaaagcagcttatttaagaaatgttggtattttccccctaaaatgtttgtatgcttaaatgaccttgaactggccaaggtacagcacagaccccgctactccccccttgccccagcttcttaaaatacagcaggctctactgcacctatcactgtttcacagggtaaaaataaaagcattgtcaggagcattgttatgggattaaagtctctcgttctgaaaataggtatgttcgttttgctttgatagttattttccccttactgcctgggttttactttagcattcttagagtaaccagggatgatgataatatttcattccatcagcgcctcttgcaatgctcctcacctgaataaaatgcatgtgccctaatgccaacagaatgatttgggcaaattcaggaagttccccacatgccatgaagtgaaattcctcatggtgtctgtcttccagaagtgacacatgaaaaactggcaatgagcacactgctcactaaataagaggccaaagagaaaagaatctaccggaaactcttccggaattaaagagtccaggctcatgttgtgatagtgattattcctcataaccagtgttgtggcgacaactgactcactggcggtcgggtggactccccccttggtgcgcacaggcgcctgccccaaggacagacacttcaaagatggctctgaacccagattctgcagcttcccccgggcggagagttaagccaccccgtgggcatgagtcgtgtttttcctttgaagagatgtttcccagctgcaatgaatgtgtggcatttgccatgacaaaataaaacccttcaagaaatgtgggttctcattctcatttctttttctccctttccctctgtaaaacttttttttctgaattatcttccaaattcttttccaaaacattagtctttctctcctcttcccctacctcccagatgaacgaatttccccagaataaatggatttccttgttgtagcctcactgtttaccaagtgcctggctggctgctaaatagccacaaaccgcacaccgcatctgttattaccgtgaggcttaggcagcttggctgtggggggcagtgcgggcggctgggctaacccaggagagctggaagactttggacaagtccgctactctgttggtgcctcagtttcctcacgagtgagaggagagggtgggcaggctaagccttctttttcctaatagccctgagccagctcagttggcagaggagccgggttcattctggagccctgaccttgatgttaagttcaggattgcaccaaagtcaacctcagtacccagacagggcaggactgaccgctagttctccttggcctggggaagccagtggggatccgtgccctgggcagacctcattgctatcccaggctgatttttccatgtcctgtttcatgagaaatgcacgactgatgttttcttgtgggggccagaaaagcatttttcagagcttcttggcagcacatattgaagatctttggctccctggggccttagctcatggaaggagggtggagctgatgggtctgctggccatggcttggcaacagggaagctgtttgtggtctccagttactccctggccagccaccagagccctactatacccggccctggccccacagccgtcctggctgcacatagtgcttccaatgtggtggtcctgccccttccttcccctgtggtctcaaaaccattccccctcccagctgctgggcttgctccaaagggaaagtgagagatcggaaggctaacacaaacctgtcttcgtgactcattacttctcttaaacatagagaccaactggtctataccagggctgtctattagaattatctggggaggttttaaaaaagaccagccccccgctccactctagagcaattgaatcagaatctctgggggtgggggggacactgattactattttttataagctcatttgtgtgcctccagggaagccatcccattggcaacactgattgcttactgggttaataatgaccttatgtactcattagaggaaatgtagaagtcctgggccggtatggtcatgaaattcacacccacttgggaaatgcaatcatccagttgtttgccatcagctgcaaatcgatagatagatccgagcttagccaatggctagctagcctttagggatagcgcttacgttgttgactgtgcagccagaaatgggtttctgctgattcatttgaatcagtgactccccagcttaaatgagtgaaacagatcacttggacagcttgttagtgtggagagcttccgactccttggatgtagtgttaagtctgagaatttgcattaaaaattttttttaacttaaaagttttattttgaaatatagatatatctatacatctttttttgtttttatttttttgagacagagttacactctgtcacccagactggagtgcagtggcgtgatcatggctcactgcagcctcgacctcccaggctcaagggatcctcccatctcagcctaaggaactaggactacagacacgcaccacgacgcctggctcatttttattcttttacgtattttttgtagagatagagtctcactgttgcccaggctggtctcaaactcctgagctcaagaggcctcccaaagtgctgcgattacaggcatgagccaccgcgcccggccagaatcgacacttttaacaggagtcccatataggcctcatgccggtggtctgaaaaccacattttggaaatcttgtttatgccgccttcttatctcttgcaaaggttagtgtttttcacaggactctcagctcttggagagggatgctacatgtccctcagtgtccccagaggacggcggatgtcttggtattaccatggttgtataacgtcttgagatctgctggcgtgagtctgccccctcatttctttttcaaaattgtcttgagtattcttggcccttttcttctctctctatgaattttaggatcagcttgccaagttctcagagaaatctttctgggatttcgttagaattgcactgactttatagattaattggaattttccaagaccttagagactcaatgtattgccagtgtcttttctaagcataaaacattggtgaaaatgtcacatgatcagtcctgccgttaggaaattgtgggaagtgctcatcaaatccatctccttcactttgcaaagaaccaggcaaggtggagttctctgcccaaggttactgggtggtgactaagttgggctacagttttaggtcccagactcttaatggctgcatcctccccttttaagagagtctgctgggttgaactcattgaccttcggatctggcgagccacgctaccgaggcaggctgtctccacggacacatttcggtgcttgtgggttctagccaagattggagaaggcattgcccccactttgttcctgggatggggtctttcaactgctgtgagataaacagtcatcctgagcccctgctgctctgaaatcatttcatgttttgcaaggtgggagggtgagccacatcaaggcgcgtgtgccaaccagcgccccagctatccttgggcatcagttagaggacacatcaggtggcccgatcctccctcggaatgtgttcattgttttcagagctccggagccgcttcaaattgtttcctaccgcgtccggccccaggggcagggctctttttctgtctctgctgtcacttacattcctctcccagctcagtttccatcacctctaatcatccctggaggactcgtcctttgttcctggattaagccgggccacctgtcactcgctcaagccaagcttcccacgtggccagggacacttctgcgatcccatcagaggggaaaacttgatgtgtttcaagaatgccctggtgccaagcttctgcagagcagcacgcagaaaatgtgaagacaaaagaatgactgcccacaggaggcgcggcacagggcagaactctgctcggttgcttgtccgtgtttggtaagagaaaaggctcccgttgcagtttcttgctgtttctttttggtggcagctttccttaaccgaaaagcacacctagctgttgatgtccccagactgcaggcaggaggctggggtgagggacttcagctctgagtctgtgccagcgagggccctagggcttctctcatgacctctttcccaggcccccgctggatccttccaaaggcacaggccttgtctttctgcttctctgggactgcaggcctcaagcccccgcgccctgggcagcagggcatggtagatgcgcggcaccccccttagcggcaccttcccattgtgagagaactgcctgaaacccgcccctgttcatgcctctgatctcccatggcccacgcagccatggggggaggtgtcttgtcagaggccttacttagcccagaggcatcccagcggcgggggcaatttcagtcccaagtccagtgcagggctgcgctgtatatttttaggcggatgaaactctgaccctcaccgcatccaagtgactgtcagttatcacctacaaaactaccgggggtgacgcctgagtgacagttgttcatgaagaacccaaacgatggtgaaatatgagcagttacctacataccgagggcacggaaagaccagtcccaggtgacgagaactcagagggccgggcgatgccctcacgtcactcaccccacccgtgaagagactgagtccacagaggaatgcctgacccgcccgcccgcctttggttttcctgcggcacatcctcggtactgttctgacagcctttccaaaaccacatctcacgtgtgtgcagctgcccggtgcccttcatgagtttccaggagcaagatcacatacagactaactgctgtggtctccagggctcctgtgcacctctcgaatagctcaccatgactccagcctgctgcatgccgcgtgcgtgtgagcacgcaacctgtccatgcttacacacacgcccacagatgcccacgctcacacgcacctgcccacttacacacacacgccaacgctcacacacatacgtgcccgtgctcacacacccgcccatgctcacacacccacacacacctgcccacgctcacacctgcccccacacacctgcccacactcagacacacttaccccccacccacacacccgcccatgctcacacacccacacatacctgcccatgctcacacctgcccccacacacctgcccacactcagacacacctgccccccacacacaggcccacgctcacacacctgcccacttacatgcccacgctcacacacacctgcccacttacacgcccacgctcacacacacctgcccacttacacacatggctacgctcacacacacctgcctgtgctcacacacccgcccatgctcacacacccacacacacctgcccacgctcacccctgcccacacacacctgcccacactcagacacacctgccccctcacccacacacatgcccacactcacacacacctgcccgtgctcacacacccgcccatgctcacacaccaacacacacctgcccacgctcacacctgcctccacacacctgcccacgctcagacacacctgcccactcacacacccacacatgcccatgctcacacatgcccacacagacacccgtgctcacacacctggcccacacacacctgcccatgctgacacacaactacccatgctcacacctgcccatgctcgcacacctgcccacactcatccacacacctatccacacttacgcacacctgcccatcacgcacgcctgcctacactcacagatgcccacacccacacctgcccactcaccacacacgcccatgcttacacgcacctgcccaaacatgcccacacacacccccacacctgcccacgctcagacacctgcccacactcacacctgcccatactcagatgcccacactcacccacacacacctgcccatactcacacacatgcccacgctcacccatctgcccacacacctgcccatgctcacagcttcccacactcacacctgaccacacccacttgcctcgctcacacacacctgcccacacacacccacacacctgccatacacacatgctcacactcatgttcacggtcaaatttctgtattgtcccataaatgattttctctattttctaatacttcattttgaaataatttcaaactaacacaactattgtgaaattaggacgagttcccatataccatttacctgggttccccaaatgtcagcatcatcactcagcaaaatgctgagatcggaaaatgaacagacacgacactattatctgccccgcaggccttctttagggggtccacaaatgcccctttctgccctaggatccaacctccagcagccactcgttttgtggaatgtccccgagtttgggttgcatgtgtttgataaatgattgtgcaggtggtgatactgggagtggaagtggctggcttcatgtcactgcgccaggacggcaggtgtgggcccagccaggacacccccggcttgtgttcctctactcaaggcgctcgtgtaggttccctccctcttgtttttctcctggaacaacacgggatatatcaagtttcctacattccgtcctttgttggtcacgtcctcatagtgtcatttctctctatttctggtagcctggctccatcaggttcaagttcaggtttgacccagccccctcaagcctctgcccttcgtggactgaggatgcacccagtctccaccatcagccttctccccgggaagtcggtgtactctgctctcctctgcctctatttgttctccctccatgtgcccccggagactatcatcttatttaaccaccatctatcggtggacaacttaaaactctgccttcagccaagagctccctctgcggctccagcccatcttccccccaatagtctgagggatctttctaaaattccatctgagggacactctttctcgttgtacttcctagtggtgactgtcccttgaccctatgctttgacatgagacctgtggaaaaaaattctacaactatttggtatgttggagggaagcatgaataaatgaagtcagattgtgcttttttgtttttgcttcagagacaacttgttcattttgcaggcggtccccactgccctctccggtgccttcaccctgggctcccacctctgcggctccactgccagcaaggccacctggccaagctcctgatccctgcgctgccccatcctctggccaccccgactggaagccttggagtcattgctgactttctgtccgacctcatcccccacattcaaacagtggactagtgcttggaaatgtccctctggggttccgcaagcacaagaggtggctgggtgcagtcctgtgtcagtcaccggcttcctctgatggcagcttggccggtggcctcgggctcttcctacaccagaccacctccctcccaacccccccccccctcccccggcagactccctccttaggtcctggcacggaggtggcactggatccatttccaatggcgagaacacaccatttctagactcttcacctcccaggcgtgctctagtccctcagacacaaacggaagaagaggatcctatgccttcctgagcccccgaacctcacaggccactgagagctggcacttggcaccaaatctccctgatggagaaagctcttgtccttcactcccgtgggagccctgcaggcctctggctcccggcccagtcagcactgtccgcccccagcccctctttctctagacctgccccaagcctgtccttgaaacccgccctacctgcccccagcctaggccccaggtggacgctcccctcggggtctgcagagccttgccggcgggaagcagcggctccggggccctaggcagacagggcgcctcattctgttctggtggcacctgtgggcacccgtgcaggcggcatagattttatttttctgcgcacattagcccagactctggaagtagttttccggcctggctcagggctggctagatgtgccgtcatttcaaatgtaaggaagcgccgggcagatctgttgtcggcggggggcctcgcacgcacgcgcccgcaggcggaggacaggacagtccccgaggccctccccggtgactctaaccagggatttcagcgcgcggcgcggggctgcccccaggcgtgacctcacccgtgctctctccctgcagaatctcctacgacccggcgaggtaccccaggtacctgcctgaagcctactgcctgtgccggggctgcctgaccgggctgttcggcgaggaggacgtgcgcttccgcagcgcccctgtctacatgcccaccgtcgtcctgcgccgcacccccgcctgcgccggcggccgttccgtctacaccgaggcctacgtcaccatccccgtgggctgcacctgcgtccccgagccggagaaggacgcagacagcatcaactccagcatcgacaaacagggcgccaagctcctgctgggccccaacgacgcgcccgctggcccctgaggccggtcctgccccgggaggtctccccggcccgcatcccgaggcgcccaagctggagccgcctggagggctcggtcggcgacctctgaagagagtgcaccgagcaaaccaagtgccggagcaccagcgccgcctttccatggagactcgtaagcagcttcatctgacacgggcatccctggcttgcttttagctacaagcaagcagcgtggctggaagctgatgggaaacgacccggcacgggcatcctgtgtgcggcccgcatggagggtttggaaaagttcacggaggctccctgaggagcctctcagatcggctgctgcgggtgcagggcgtgactcaccgctgggtgcttgccaaagagatagggacgcatatgctttttaaagcaatctaaaaataataataagtatagcgactatatacctacttttaaaatcaactgttttgaatagaggcagagctattttatattatcaaatgagagctactctgttacatttcttaacatataaacatcgttttttacttcttctggtagaattttttaaagcataattggaatccttggataaattttgtagctggtacactctggcctgggtctctgaattcagcctgtcaccgatggctgactgatgaaatggacacgtctcatctgacccactcttccttccactgaaggtcttcacgggcctccaggtggaccaaagggatgcacaggcggctcgcatgccccagggccagctaagagttccaaagatctcagatttggttttagtcatgaatacataaacagtctcaaactcgcacaattttttcccccttttgaaagccactggggccaatttgtggttaagaggtggtgagataagaagtggaacgtgacatctttgccagttgtcagaagaatccaagcaggtattggcttagttgtaagggctttaggatcaggctgaatatgaggacaaagtgggccacgttagcatctgcagagatcaatctggaggcttctgtttctgcattctgccacgagagctaggtccttgatcttttctttagattgaaagtctgtctctgaacacaattatttgtaaaagttagtagttcttttttaaatcattaaaagaggcttgctgaaggatacactggctgtgtgtatttatctcaattctgcttgatgggccagactaattgttagaggaaatcatatgttacctaaggtcttcactttatcttgaggtttaaattcatcgagatttgatttggtcttagaaagatcaactagtcaggtaaggtcaatgtcttggatcttttgtgacacccccaagaccaggaaatgtcctttattcacatgcatttcactcccaaatttcagctaccacagaaagaccgactggcagccttggtctgatccagatgaatgggtcactcagagactttcagctcccactaaaatggacagaaattgtgcatgaaaaacacatcactgagcaaatccacactgtccaaataaaaaattcaaaatggaaagcagtagctatgaatagctccacagactacacttccccattcaacctctgggggaagaaaagggatcctctggtggtggtaagtctagaacacattcctgtccaggaaccagaaggtccacagcaacaacaacacaaatccatacattaaaaaggactgcctttttttttttttttttttttgagtcggagtctcactctgttgcccaggctggagtgcagtggcgcgatctcggctcactgcaagctccgcctcccgggttcatgccattctgctgcctcagcctcccgagtagctgggactacaggcgcccgccacctcgcccggctagttttttgtatttttagtagagacggggtttcaccgtgttagccaggatggtctcgatctcctgacctcgtgatccgcccgcctcggcctcccagagtgctgggattacaggcgtgagccaccgcgcctggcccagaactgccttttaaagcagcaacttaggtgtgttttccgtcatcgctgctgttgtgtaacactttccaggtcactcctcaaatataaacagtgcaagcgttggaggaagggcacacaaggagaggaaactatctgcatggggaaaatgtcatgattttattcactgcattaattattagtttaacctcagcttgctaaaaggtagcacattcctaacagaagaaatgagctttccatttgaagatcgagaaaggcagcctgtgttttttctctgtaccgtacattcatccgcttagtgactatctactgggcacctgcctggttctagtcacccagctcctgcaaggcggcagtaagcgagacagcctccctcctccactaaaatgatgaaatggcaaagctgctcaagcgcctcgcacctgagtgccgctctatgaacctgctcccttcacctcactaagcttcattttccttccgtgtgaaatgaggtcacagcgcccaccctgtgaggattcaacactgttggtaaagtgcctggcacagtgcctggcacacatgaacacgtgtggacagggacacatcattgcactgcagtcattcataagccacattgaaaataaacatcaagctaagccttctgcatttt

SEQ ID NO: 281 - DNA, 248631 bp, Homo sapiens
  source 1..248631: mol_type = genomic DNA
gccgccccgccctggcagcaggtgtcttcctagaacagaacaagccccttttgatgtcattgggcattgccttggcggtttactcagaagctggaggctagcctcgctagagcccattgccaggccctgaccgcccctaaatctgtgtccacaaaatcctccggagtgcctgctccgcatggtggccactggccacacagggctgctgagcactggaagcggccttgtgagctgctgccaagaggcaggtgcccgtgcaaagccttcctgtgaaggaatctcactgaggttgttaaattctggttacatgttgaatgatgtatctatctattgggttaagtaaaacgtattgttaactttggctattacttgttacctttaaaaaatgtagctactggaagctttaagatgacaaatgtggttctcctcctccatctacaggcatgtcccggttcacggcggctgtgtccccgcggcctcagacccagggtccagcccatgctctggcccctccggcggccaggatcagcatcgctgccccggggcccgcgccgagccggctgctcctccgtgctctgcgctcctgggcccgcaccagccccctcccctggagcccccttcgtccctgcgagggttccctgcacgccccgcgctgagacccagcctggcccgggccggagccctccgcgacgtcaggatgcgcctggcctcacgccgcctcccctccgtcttctctgggccgcagccgctcctcgtgagtgaggtcgcggccagggagccgggtggacgcgccgggaagctgcacggtccacgctccgtctgcgcggagagccgggcgcgcgtggcccggcccctgcaggcgcgactgccgccgccccggtgggctcccctcccccgcacgcccggcacgcggctggacgactgcggccgcgcgggggctggaacatcccctcagagccgcaagagagcgcacccgccgccggcgcccggaacccagggcccctttaagaggcgccgccggagcagggccgtgacgtcatagaagtgcgaagggcggagtctgtgcgcagccgcggcgcggggggcggggcgggggcgcggcgttcttgcgggcctgactgacaggagcgccctccgggagcgaccagtactaggccgccggtcgcaagagcgccccgcgtaggccccgccccgaaaggaggccccgccccggggcaggccccgcctccacaaggacaccaagtcccgcacaagccacgccccccgcaggccccgccccactctgttcagatctaggcccaactcaggctccgcacctcaaggctccgcccccagcaaggctccgccccaggcccggctccaccccgcacaggccccaccccgagtcaggctccgccccgcccaggccccgccccgggctcggctccgcggggcgggacttgccctcagcctgagtcggcggcggctgcgggaactttcccagcggatctaatggctgcgcgcgggccgctgtgaggcgcggcggcgagcgacgggcgcggggccgcggagcagcgagcgagcgagcgagcgcgaggccggagccccggccaggcccggccgacccgccgagcccgcgatgcgccccggggccgccccccggcgcagctgacgccccgcggccccgcgaagaccccggccggccggtcccggaggaagcggccgccgccgccgccgcccagcccagcgcccgcgccgcccgggcaccatggcggggaaggcggccgccccgggcaccgcggtgctgctggtcacggccaacgtgggctcgctcttcgacgacgtaagtcccccgtgccggcggcaggccccaagcccggaacccccgaccctgaccccggggtcccgaactgcaagccttggaccctggaccgtgaacctccagacccagaggccccagactctgatccctgtacccgggaccccagactcctgtcctgattcccaagtctgggagcccagacccctgtcttgatccccaagcccgagacctgaagacctgggccctgaatccccgaaccccatcctccagactccagcagctgaccgttgaccctgggaccctgcctctgaactcctgtctgcaaatcctgacctcgaaactccaatattaaaaccctgtcagaacccctgttaacagttcctggaacccaaaccccagaaaccgggtctgtgcgcaccaaacccagccccagccctgatttccgaatcctcagaaccctggccctggaatgcccatccccaaccctggccctgaaccccaggtccatggtcactggaaccacaaatcctgactgcagaactctggttacagaacctgctctcaaacgtctgtctctggtccctgagccctggaccccaaaccctgaaacataaccacaaaccctaacccaggaacttctgacacagggctgtggccccaacctcctgtccctgttccccaatcactgaattctagccctagaatcccagccttcatactgtggccctttgcctctaaagccaatctagcctgactctgaaccctgaatttcaacctcaggccccagcttatggccctgaacacttgtccttgacccctgaacctggaaccctggttccagaatcaggccccaaacccaattctggaccctgcccctaactctggttcctagatcccatccttggccccttcctccaacaagctcctgcccctgaatcctgaatcctgaatcctggtcttaaagcctgggccttgagcctgcagaattcccaaaccctaacccttgactcccacccctggcccctgtcctctgagcctaggccctccactctggctgtcagccccagctcctggatgcctgggtgccggcctcactgtctgtctgtccctgcagggccagagggtagggtgcccccatttaaccctgccacttagtatctctttagttcgtaaataagggaagtctgtaaagcactgtaggactttatatttcttgtttattgaagaaaaagatgctgagaagctcttcagggccagaaaggggatgctgactgcctatggcctttaccttctagggcccctcccacccaagcctcattcccacccaggatcccagggtgcccccatctctggagagaccagggagctgaggcccagggcgcactgggagctccccagaggcaggccggtctgacctagtttggcgtttcagccacggtgccaccctgctgttggtactcctgctgccaacccaaataaagcagagtgaggctccaagtggcccagatggaggccgtggagccacggacgctccctccctccctccctccctccctaggtgaacagtggggcaccgcaccagctttatgacggatgtgtgccactgatgcacgcgtggtttccatttcaggaggaggtcttgtgtctttgctggcagcaagcatgggtgaagtgtttgatgaagctcagttcatgcacaggctaggtttggtttttattaacaaaaggcgctgtttttctgtttttcttattttaacttccaggtgcccatgtattatactgacctgctggggaggaactggttttcctcacactttattattaacaacttcatctaggtttatgtttgatcattttctacaaaagtgcctggcatgggtgtgtgtctgtatatttggcgttctattctaggctttccagtaacatgtcactatagcatggttttgttcagatgattcagatccgttagctgcggcttcaaagcctcagaaatgtcaggagcattaagcttgctggggcattttagtctcaaagggaaacgagttttactgtgcagacattctttccagtaatctttgattctgagttctagcatttttgttgtgtttcaattgtatacacgtatttatctctgttgatattaaattgggtaacttaattcacttttgtttagcaacctattctctctgaattttcatttttcttaaaggctatgtggaattttgcattatgtttatgtttagaaggaacatttgtttaggtcaacagtacataggttaattctgaaaggtgcattgtgatttcagggctgagtggaaacttatctgtccgtgtctgaagatttcttaatgtgtgcagctcagtccccgggggccagacccagtctccttcagtggaaaccagccaggcactcacattcccaggcccccttccttggttgaggtttggggtgtggtacttgtgggccagaagcctggccggtggaaggaaattcatgagtgaaggaagttttggtttcttggtttgtcctggatttcaggggacctgctttgagattctgtttgcctttgtgcagcccgtcccgtgctgacgaacgcaccctgcaggcagtgctcaggctgtgaaggaatctttctcgcccagtctcaccgtgttggaagccaagctcgtctgtgaccagtgctggagccggtcacagttccgaggaggaaggtgtttgaatctgaagcagatatcccggactgtggcggactctgttttccttttgtgcacaagtgataggtggtttgcttttgcttttgcagttttgaaagtctcccctcttaaggcccctcctcctccccctcttgtttttgttttagacagggtctcattctgtcgcccaggctagagtgctgtagtggtgcggtcacaactcactgcagcctcgaccgccctgactcaggtgaacctcagcatcctaagtagctgggaccacaggcacatgccaccatgcctagctaatttttgtagagaccaggtttcgccgtgttgtccgggctggtctggaactcctgggcccaagcaatccacctgcctcggcttcccaaagtgctgggattacaggtgtgagccactgtccctggtccagaggtcacccctctcaaaacgctgcgtgcatccacttcagctgtggtttgtagcatcctgggatccacacggaatctcactcagcagcccctgtttgctcatcactactccatctttgtgaccccagattggccatgctgcgggctgcggggctgtccccactggggttgtgtctgaccctgtgcagacagtgttgcggtaaatgccttacagtgtaccggtccccaagcccttatccctcactttcctagaaattatggaggacccgaaagagttcttgtttatgttggttataactaccaatatttctcatattgggagctgagactgcatgagaatacatagctcactgcactagctggcagagcgattacatcatcccacatcacaggcaccccctcaggtgttggccgttcttccctaggagacagtgagaatggaaagaggagtcattttgtagtattatggaaatagtgttgacctagtcaacctgtgaaaaggcctcctcagcccagtcctccctccccatactgtcatgggcacccctgtctctggccaggtggctggggtgcctgggactttcccaggcttatgcagactgccagatcaccctcggtgagccctgcagctggtctttaattcctggattggactcctgctgtcactactggtttgcttggaaagaggtgaccaggggtccatatttaattgttttgctttgatgtggctggttttttgacaagtgaggtttctggcttttggttccttccatttttatgagaagggaattgaggaggtgaattcttgccagctgtggcgtcccacccttgcatggtcaggctgctgtttggtcctgagaacacagcccgctggcgggtatctgcctggtggcccttcctgctgcttgttcgcagctaagtcagttctgagccagtttgcctttttgcttagtcagctcccgggcagccctgtccctctgcccagacccgggtttgcagaacggctgtgagagtgggctcggcaagtgctcgctggcagggacctgagcaccttgcagtcagcaggtgttgaagagccctggaagagcgtggaggtggcggagctgctgtgggtatggagtcggtgatggtcagtggtgcaggctggcgtctctctctggtagcatcagcattgccttctttgccatgtggttcctggcaacaccaaaggtactgccctctctcccaccttgaaaactctgaactccatgtttcctccagccactgcggggcatcctgactctctaccgtggcagccctcgagtggggtgggggggtctcccctccatgtccttctccaggcctctgccccagcactcctgcacagcagggcccagggctgggtgcgggttgtacccagctggcagtgactagccagaatttttgctccctctgtggatcctccttcttcttcagggacgtttcacttggtaatggctgtgctgggacagaattcgcacaccatgcccctcacccatttctttttccttttcttttttgttttcacacagggtctcattctgtcacccaggctggagtgcggtggctcactgtagccttgaactcctgggctgaagtgagctgaagccatcctcctgcctcagccttctaagtagctgggaccacaggtgcacgctaccacacccagctgatttttttatttttattttttgtagagatggggtcttgctgtgttgcccagactgggctcaaactcctgggctcaagcagtgctctcatctctgtctcccggagtgttggaatcacaggtgtgggccctcacacccagccctttctcccatatgaggtgtacaattcactggttttcagtatgttcacagggtgtgcagctgtcaccacaggcaattgtagaacatttttatcacctcaaaaagaagctgcattagcacccaagccccacgtcccccagcctccccaccccctgcagtcagttttcctctctgtggatttgcctgtcccgggcgtttcacatacatgggatcagacggtctgccctttgacctgactgctttcactgagcgtatgtaaaagtgtccatgctgcagcgtgcgtcagtcctgcatttcttcctttctttcttttttcttttaaattacagagacggggtcttgctgttcacccagactggaatgcaatggtgtgatcgcagctcactgtagccttgacctcctggcttcaagtgatcctcctgccttagcctcctgaataacggggactacaggcatgcaccactatgcccagctaattctttttactttttgagaagatgaggtctcactatgctgcctaggctagtctcaaagtcctggcttcaagtgatcccctggccttggcctcccaaagtgctgggcttacaggcatgagccacagtgccaagtctctttattcctgtttatggctgaataatattccattgtgtggatacaccaagttttgtttctgtgttcatcagctggtggatgtttggcctgttccctccttccggttctggtgaacagtggatgtttggcctattcccacctttaagttcgggtgaacagtggatgtttgggctgttcccgccttccggttctggtgaacagtgctgctgtgtgcatctttgcaggcgtccctaggcggacatgcgttctcagtgctgttgggtgtgcatagtcttggcattgctgggtgacgtggtgagttcgtatttaacccttgagggcctgtcaggcagtccatggtggctgccccatgtcacatccctcccagggttctggtttctgcacctctcagtgttggcgcccctgggctcaggctggccacccttctcccttcctgggacctcatctagacgcacagccataagtgccatctctgtgtgggtgcccactcccagcgagaagcgcacaaccaggatgctagcctgcagtaggtggggccctgctctgccgctccggccagagcagagtgccagctctcaaggaggttggggcgtcctcatttcggaggcagctgtcttcctacctgtgtgccgggcacagaggatgggggcggcctgtggtctgcaggtgccctccctgccccggtgcggcaatgggcgtggctggaggtgtctcagcagtctttttttttgggttgctgtctctgacccaagatctcggtgcactttccctgggagaattatgacctgtttgccagggctcataagcggcaggatcgtctgtctgccgggcagggagggttaaatatgactgtggtcccggccctggctgcagggtacgggagctgcttctgccacctcaggaaaccacgtctaaatcttgaacacctccttaccttagacagcatcatttcgggtcggtccttgatttttagacttttggaataagcctggcagttctccgtttgccagctctgcatgcccctctccctccggccctggcatttgggacgcagcaggctgtgctctttggattgttactgattcagcctttgagaacggccggcggtgttctctctgctcacaaactttcatcccccgtttacttcctgtttttttatcagtctctagagttgctgaggagagagtttagatcacccgggttaggggtgggggtggtgggacttctttggtttgaaatattaacgattcctcatgttttgaagtaagcacccagatcgacctgtcgggcagtgttgggagaatgtctgcacgtaggcgtggtcacgtccgtccctgttgcctgcgctgctccgagaagccccactctgaccagcaccactgaggagtgtctgtccgtgtggagttgtggggcaggtggagcagggcagagggccccgcacggctctgggatggctgtgctcggtgggggtctgattttgggggaagaggctggtactggggtgtttccgtggacttgttgggtctgattcagaagttacagaaatccagacccaggcctgccccaccgtgaagcatcaaatttagagcccctctgtccaggggctagaggggcattcggaagactttgaccagatcggggcggctgagggggctgcctacggcaggagacggcaggtctctctgagctgtggggctcacggagggacagcctccaggaaggtggcctccatccgggaatggggtccaggcggaggagggtgggcatctctccacatgccactctgtgccccactgcccctgccggggtgttcccgctgtctcctgggcgggtccttctgatgtgagtgcactccagtgaaatacctgtgggggccttaggggaagagggtgcggaacaggcaggctgttcccatgcggacctgaaagtgctgtcaagttcccccttcctttgctcggtttcattaattgggatacttgggaatctcagagcccggtgggaaccaggaactgagctcagaggctctggagccccaagtcgcaccccaccaggtctggttggtgctgccatgggctcagatctggcgttttccaagctccccctgctttgtggagctctgagcgctggctccaggccggctttcaggaaggccgactgcctcaatcgtggttgctgcctccgctcggcctgaggtgatgagagtgtggatggcacctgcactgtgtccactctttaggctctaatgttcatggtgtgtttggagacgtggaagtggctctggaggagcgtccaccaggtcctgcttgtgtacgggggccggcagcaccgttgtgttgggatgagtggccgaggcgtctggggacgtcctggagcctgcagcccttggccgtgtcacgccatgtgctcatgtgaccgaggacgcttccgaggatgtggaagccaccagtcgtcctgggtgggttggggctggacaccacttctggggcaggtctagggtgatggcgctcccagcccgcgggggtcttggcgttggcgcagaagtggtttcccagcggcgtgccctgagtgttgggaaaaggccctctgctgccgctccaggttcagaagatgccgcttctggtttttccccgttgtgagtgagaacagccccacctccaggagcatggcctccggatcagcctgttacttgaaccctgagcccctggtgggtctcggtgaccttgagccggttgtcttcttgatccttctctccgacaggagtgtgagactcctcttcaggggttgctggggaccagctggttgctgtgtcggggggccgtgctcccccttctctcttggaaggtgtaagggcttagtagggctgcctcggctgctggggcagctttccccggccccttccccgcctccttcccactctggattgtcctgggcgtctctgtgtggggtctcctggctcctgcagatctgtgtagcctgcactgaactgcccctcttcctgggtgcactgcataccccgggccccctgggctctggcctgtccccttgtccccacctgaccgcccagccactgttctccctggcccttccctctcgtttctgcctgggcctgcctggctggtcttgcctggccctgcttttggtcctgtaggcaccaggactgcactctggcaggggcagactctgtttcctgctcagcagagcccaggcctggccctggttagcaggctgtgtcatctgccgcagacagccttcctttctgcgtcctcccctctcggggtcccgcatgactggtcctcattccaggaaccagaggagattgaagaacccgagacttggctttggcccaagtccctgtggagaggaaatcccgccttcagtgccaggtgccaggccacagtccaggttcacgtggatgcggggcaggccccacctctcctcgcatgtgcggccttgggctgtgtttcacctgtcagcctgtctgtgcccagggagtaggaatcccaccttgcatggtggctcagggtggtcagggagggcgtggctgtcacatggtttctggactgtcagcctttgggctgagtgaggcgttactgccatcaggggtccctggaggggctctctccatcctcttcctggcgtcaggtgttctcggcggcctctcggtaacagcctggcctttgcttctgtccggggcgcgtggcccaggctgagcagtgcactcggctgcctaggtggtgtgaggttctgtgagcccgggcccagctgccgtggtgaatataaccgggagggagtgcccgcctctgcccacctgcctggcatctggggttcccgggaggccgggcacctgcaccctcgccgtcgccctgggctgacctcccatctcctccttctctacccaagcgcccgtggcctgaacaggacttggtttttcaggccttcatgcctcagcttgaggggctcttttttcaaagggttcctccgggacgcctcgcctaggcaagcagggttttcctccttcacgggacagcccgcgtgcccccagccctgtgacgcgctcttggtgactcaccaagtgagtcccaagctcccttcctgtcatactgtgctttaccgtgactgtggcgtcacactcaggtgtgctggcctttggcagcagcgtctggggtggggaccatggtgtcttttttaatttttttttttttaagatggacactccatcacccaggctggagtacaatggcgtgatctcacctcactgcgacctccgcctcccaggttcaagcagttctcctgcctcagcccccttagtagctgggattacaggcgtgcaccaccacacccggctaaattttttttgtatttttagtagagacagggtttcaccgtattggccaggctggtcttgaactcctgaccttgtgatctgcccgcattataggtgtgagccatcgtgcccggccatggtgtctttattcgggttctgctcaaatgggtggaggggtggggtggggccaatgcagctggaagggagttggaggagctgtggatccggtagtccccggaccgtggtggtgtttgcggccacatatgccatgctcaggaggtcagtggggccaggggaaggggtgttgaagtcaccaaaggccaggccaggcctctgctgcccgttgccggtggcccgggagtcgactctgcttctgcctcgcacccggcctgggggtgttccgagatctggttggcttttgtgtttgcgcgtttaacagtgttatttacccgggatttgaatagcatgcagttcacccaatgtgagtgtatggttcactgactttgagaaaatatttatggtgtgtaaccatcaccgcaccccagttttgagacacttccctcctcagtccctgctcccggccctgggccacaactgctttctgtcccgccagtttcgcctgcgccgagggcactgtatcgtgaaccacaggctgtgttgttttcatgcgtctggtttctttgacttagcataacgcagcgtttcaaggtttgtattgatatgctttgcatatcagcagtttatctggcttttttttttttttttttttttttgagatagggtctcacttccacctaggctggagtgcggtggcgcagtcaccactcaccgaagcctcaaactcctggactcaagcattcttcctgcttcagcctcctgagtagctggggccacaggcgcggccaccatgccaggcttttacaattttttgtaggtatggggtctcgctatgttgcccaggctggtctcgaattcctggcctcaagtgatcctcccaccttggcctcccaaggtgctgggatgacaggtgtgagccactgcgcctgggcttgtcttccctgtttcatggctgagcagtgtcccctgagtggaggcatacctcgtttctccagtcgcccacagatggacgtcggggctatcgtggctagtgtactgtttgtgaatatgcacgtgcctgtgtggacgagggtgtcactgctctagggctggccgagtggtcactctgtggctgtctttccgggagctgctcaattcttcccatagttgctgccccattcgtgccccgtcgagtggtgtggaaggactctagctcttctgcatcatgccagcacttggtggcatttgtctttttaattatggctgtgtggtggcatcttgcggtttaacttgcatttctggtcctacttccaaataataattccccacaaggatggttatcttgccgtgttggtaatggctttgacagctggatgacagacggtgttggcgggctgccctctgcccacccctccaggagggcctgtgggatgcgaggcctctgctacgaggctcccgcttgcctggcaggtggcaggtgtgatgagcatggggagtgcaggtgaagcaggagcagacaggtgcgtgtcctggagctctgcagctgcagggcgggagccggggcttccgtgaggctctgtgacacaggtcggggccacccagcccagcctgggttcctgcagcccccactctctgcccctggtctgaatggtggggttggtgtgtctctgttacaggattggtgtgacgtctgagtcactgtgccttagagtacggagtcagcctcaaattattaaccaggcattaggggatggggtcagcctcgagttactaaccgggcattaggggatggggtcagcctcgagttactaaccgggcattaggggatggggtcagcctcgagttactaaccgggcattaggggatggggtcagcctcgagttactaaccgggcattaggggatggggtcagcctcgagttactaaccgggcattaggggatggggtcagcctcgagttactaaccgggcattaggggatggggtcaggctcgagttactaaccaggcagtagaagatggggtcagtcttgagttattagtatttatcggggagagcagagagagcttaggagaccacattgccactgtttagggtcagagtggtcccgcaggttaattcacttcacccagcctctcagggatgtaatgaggctgctcggggggctgtctcaggcctctggccagtagtccctgtcctctccagcgaccgctctctcctgggtgtcagtggtttttgggagtccaggtgcaggtctcagcagcaactctgaggttctgcatagctagtgccacctgtgacactgctgtcactccaaggtgcacctcaccacacctggagcagcgcccgtgagaggagggaagcgacacccttgggctgagcttttccgtgaaccggcagctgtgtcccttgacgtgctgagagggcctggctgtgagccgcatggtacgaaccttctgaatgcaagtggccaagccggcattctggctgggctcgctggccacaggacgtccactgtaggacagctgggagtgggggtgtctggctatttcactattaaaacaagtggaaacactagtttggtcccgcctgacctcatggaagacggtggaggtggcagccgccagagtgtgaggggccatggtcgctgacctcgcctcctgttgtcttagatccttggcactgcaggggcggttctgccagacatagctgttgtctctttggccaccaactggcccctatggcgtttggccttcagggtggtcattgggtgcgtggctctctagggtggacctggccatccttgggtgacagtgggccatgtggtggggactctgcaggccacctggaaaggggtccacctgaaaggggctgcactgtggtccatttgggccagtggcttcagtagccacacgctgcttggtccaggttcctgcctgagcccactgagcagatgatggggatgaggcccagagtgcgagcctggtgggcagctgtggagccttatccctgagcaccctcccttgcctacctttcaggcttctgagcggctgtcagttgccacctgctggcactgtgaatgttagactgcagagctgagtggggagccccttcctgtggtccctggcactctgaccacatggatgagcctgcgagtgtgaagctgagaactgggttgactgcctgctgctttgtttcttgcaaagagtgccttagttaggggacaggccagcccaccgtcatctgcctgcagcgtccctccaggtggtcgggggacaccgggcttctgggtcagcaagtgtttgccatacgcctgggtgcaaagtggaccagccactgtgggtcatgtggggggatttgggtgggactctcagaggagctggttctcttgagaaagacatctgtccaagtagcacacagacttgtggggacatatgacttgctttaattttctccatcaccgttacggtttttcagagctgttgcaacttcctgtttgctgtaacggctgtgcctccctcgctgctgcagtgggcagtgtgtgcgtcgtacacaggtggaaggtggaggcctgggcccaggctggagggacgtggggtgggaatgggcctgaccagctagggaacagaggcaggacccagggggacagaggcaggactgaccaagactgtcagaagagccagccggggtcttctctgaatagtcggctgcacgattaaactgggttctgctcggggagtccctggggtttggagctctgcctgccttgcggcccaacctggcagtaccccccacacaggggtccaggtgtcctctgattctgctgtgctgagtctgttggtggagcaggaggcccaaggaccaggagagcttctgtgtgaggctgtgtcctcctgcatccttgtctcccattcactcgggagcatttatgggcgcattctcagagccttggtgaagttggagtgggatagggagggaggattggtggcgccttctcagagccttggtggcatattgagtgggatagggagggaggattggtgaatgccttctcagagccttggtggcatattgagtgggatagggagggaggattggtgaatgccttctcagagccttggtggcatattgagtgggatagggagggaggattggtgaacgccttctcagagccttggtggcatattgagtgggatagggagggaggactggtgaacacctcctcagagccttggtggcatattgagtgggatagggagggaggattggtgaacgccttctcagagccttggtggcatattgagtaggatagggagggaggattggtgaatgccttctcagagccttggtggcatattgagtgggatagggagggaggattggtgaacgccttctcagagccttggtggaatattgagtaggatagggagggaggattggtgaatgccttctcagagccttggtggcatattgagtgggataggaagggaggattggtgaacaccttctcagagccttggtggaatattgagtaggatagggagggaggattggtgaacgccttctcagagccttggtggcatattgggtaggatagggagggaggattggtgaacgccttctcagagccttgggggaatattgggtaggatagggagggaggactggtgaacgccttctcagagccttggtggcatattgagtaggacagggagggaggactggtgaacgccttctcagagccttggtggcatattgggtaggatagggagggaggattggtgaacgccttctcagagccttggtggaatattgggtaggatagggagggaggattggtgaacgccttctcagagccttggtgtggaatattgggtaggatagggagggaggattggtgaacgccttctcagagccttggtggaatattgagtaggacagggagggaggactggtgaacgccttctcagagccttggtggaatattgggtaggatagggagggaggattggtgaacgccttctcagagccttggtggcatattgggtaggatagggagggaggattggtgaacgccttctcagagccttggtggaatattgggtaggatagggagggaggattggtgaacgccttctcagagccttggtggaatattgggtaggatagggagggaggattggtgaacgccttctcagagccttggtggcatattgagtgggatagggagggaggactggtgaacgccttctcagagccttggtggaatattgagtaggatagggagggaggactggtgaacgccttctcagagccttggtggaatattgagtaggatagggagggaggactggtgaacaccttctcagagccttggtgtggaatattgagtgggatagggagggaggattggtgaacgccttctcagagccttgatgtggaatattgagtgggatagggagggaggattggtgaatgccttctcagagccttggtgtggaatattgagtaggatagggagggaggattggtgaatgccttctcagagccttggtgtggaatattgagtgggatagggagggaggattggtgaacgccttctcagagccttggtgtggaatattgagtaggatagggagggaggattggtgaacgccttctcagagccttggtggaatattgggtaggatagggagggaggattggtgaatgccttctcagagccttggtggcatattgggtaggatagggagggaggattggtgaacgccttctcagagccttggtggaatattgggtaggatagggagggaggattggtgaacaccttctcagagccttggtggaatattgagtgggatagggagagaggattggtgaacgccttctcagagccttggtggcatattgagtaggacagggagggaggactggtgaacaccttctcagagccttggtggaatattgagtgggatagggagggaggattcgagggcgcctcctcagagccttggttaaatatttattcagataggaagtatttggaatatctgttgtcactttcagggcctcactagcctgttgtgctcacagggcaaaggggtagtgtactgtgctgcctggctccacggctgtggtcaccggcttccctggcttctgagctccagcaggagatgagggatttgtccagtggctggagggtggcttagggcacgcagagtccacagtgcaggtggacaccgcagagggtctcctgggcaagtggcggggctgggttctgagggcttcagaggatcagagccaactggagaataaggaaggggcagctgttcaggctactgagaggcgggaaataggtgctgagcctgcctgggaagctgcgtggttggtgcggttgatgtgggtggcatgggtgttgtgggttgtggttggcgtggttggtgtgggtggcatgggtagcatggtccatgtgggtggcatgattagcactgatgtgggtagcgtggttggtccatgtgggtagtataggtggcgtggtattgtgtgtggcatgattgctgtggttggtgtgatcaatgtgggtggcgtggtattgtgtgtggcatgattggtgtgggtggcgtcgttggcactgatgtgggtagcgtggttggtccctgtgggtagtatgggtggcgtggtattgtgtgtggcatgatcggtgtgggtggtgtgatcaatgtgggtggtgtggttggcattgatgtgggtagcatgggtggtatgggtggcatggtgtgggtggcatggttggtgtgggtggcatgggtagcatggtccatgtgggtggcatgattggcactgatgtgggtagcgtggttggtccctgtgggtagtatgggtggcatggtattgtgtgtggcatgattggtatgggtggcgtggttggcattgatgtgggtagcatgggcagtgtgggtggcatggctgctgtgggtgacataggtggtgtggctggcgtggttagtgggtggcatagatggcatggtggggtgggggggtgtggatggcaagcggcaggaccaggtgctgcaggctgggtggtgatatgtgatggtgctcaggcccctgttccttcaccgtgctggggaagggcgctcctgatccctctgtgagaccagtgagaagatgtcgtaggagaggctgttgtcccctgagtacgttcaccccattttacaggcgctggcccagtggagctgctggggcctatctgtttttttgaacttctgataagttgcctggccggaaggggaagaaggggggcttgggctggggcgtggccacgctgggaggatgaggagcttgaagtgactcaggggacctggcgccgttggtgtgtgctcacaaagtgcacggggtgaccaggagcctctggacagtggggccgtcctgactcgcctcctgagagccgtgggtcacaaactcaaatgcacacacttggggcttctatcctatcagggagagagttcaagtgtatcctagcgtcttggagaaaaatggtctatgaactttgataaccttgacaattttagtttagttttcgtgcagagtgacccagacaggcacaacactgacacaccttgtcacactctgcagggtgttttgttgccctcagcacgtgtggtctgcacagacagaccagggggtgacttcagcgttttatggcagctgctgcattaggaatctgcgtcacagatgaaaaacacgcgtttccccttttcgtaagaggatgaacagcctctcacctgctggaattcaccttggctcagcgcttggtgcttttgatggagaaaattcagttccagacttgggtggaacctgagttggggtctgccgtgccctggtgtctcggggggctgcccggcccctgaagtggaggagccgccttcacccaggcatctgtcccagcctgtgggctcccttccttgtgcagatgcctggcccagcccccgtgctgaagttgccagatgtataggtcctccttgatggcacgctccgggggctgtcactatgccacctgtgtcctcctgtggctttgtcctgcaggcattgtgaggtcatgcagcattttaactgctgtgaaatttgctccaccgagtgaacacaccagaatgcatccacagacccacagtggacactgaggctgtttcctgttcggctgtcacatgggctgatgcggcgagccctctccgtgcacctccacggggaccagggccagaatatctgggcacctgttggggctggtggaagctgctctccagtgtgccaagtttctgtacacacatgcacatcacacacttgcacaccacaggcacacacatgcatgtacaagcatgcactacacaggtgcatatgtacacaccatacacatgcacaacatacatatacatacatgcataccacataggcacacacatgtgcatcacacacatgctcatcacacactcccaccaggccgtcggagagtccctgatattccacatccttgacaacttttgttgtggtcaggctttaaaatgtgacctattagatgtgtaaaatggcatctgttataatttaatttgcattgccttggttacttgtattatcattttggggatttttttttttggttttctatgattttgattttagaactttggagcccttgcagatcttgtatttaggttgctgataagttatttgatgaggcagtgactgtagggtttgtggaatagacacttctgtcattgtgctccctgatgctgagtgacttaggcttgtgacttctcaggacggtgtttactgatgggtgtagagaggtcactttctgtggcactcttggctgaaagttttcttcctgagtctcattgtacgcacatgttgtggcctttgtgtgtgtgtttcttttgtatgctgtgacaccggtttggtaggtctgagtggagatttggtcagttccgcctaaaggccgacgggcccggctttctggggagaaggttttcccttgcagaggggtatcctttggtgtctgttgccgctgtgaccgactgtctcacatgagggatggagtccaggctgaggcaccctcgcccggggccactgtgactcccatggagcctgggatttgttccggttaggccacgggtcacagtgctcagtgccgggcagatgtgggctcctgcagcagtgccctcctgcagcacgcgggcacctggcctgtgccacacctgcgcagtgtcaccgtgctgcagaggagcccccatgcagagtcacgaggggggtttccccaactgcttaatgccaacaagagacctgcgtagaaatcagaagaaaatggccgctctcagctgctggttcagctgctcatttttgtgtagggccgagtcaattttttcttcttgcctcttttctgagttgatgttgatgccagcaagtgcagagggtcattgagtgctggtttgaacctggtgcctatggaattgatgtctgtcagacttagggtgtaaccacaggttgtgaggtcattttgaggggtcagaccatatttgggttaaaaggggcccgagtgtctcgggctgcagggaggtgagtcctggaggtacttaccatagttttctgttgaatgcctctgggcctgggcggggagggccatagcctaaagtgtgcatcttaccctgggtctctgttcagagtgtggcagccacggcttatggcgggagtgacgccaggctggacagagccaggtgaggccctgtgctccctcagtctgtcccgcgtgcccgcctcctgctgcgagaattctagtccctgtcttcccagtggacctgggggctggactgtggtcattttcactgttgaaagtgagaagattctcacccatgaaaaattaaattgctgtagaacctaaacatggccaccgtgtcttcttaactggtagtaaaagccacctggctgtccaggtggaggctccgcagggcaggtcagagtacctggaggtgtcagcagggaaggggcgctctgtgtcctgatagccttcccgccagctgcgcatgtgatggggtgtgccaagggccacgcagagccgcgacttccccaagctgctccgggtgtccccggcccacgcgctgagcacgctctggggctctcccccccggcccacgctctcctgagaggccactcgctccggggctaatcatggttaatcccacatgatcctcgcctgacatccagtccccctcctcaggccctgacagctgcatggtgtgttggtatttctgcctcctgaagccacgtccacgtcggctcctgtgcagtagagaccggagtctccatcaggctccctctgggggcgggtggtccatatgcatggggtccacttgtccctcatgtccagtctcctgtggctggaagagctccaggtgtggagagaggccagctgcagctgccgatgaggagcgctgttggaggagcccttcctccttctccctggagctgggggacgctccaggtagggaggcggtagccttggcagcattgggctcagtgctagcctagcctcgctgccatcgcatgcagttgaccagcttcttgacatcctttgcctaaactcctcagggtcagcgtgggaccaggatattccatgtggcttttgaagccggcagtcgccttgcagtggtgattcccaggtggaaccctcaggcagctgtgcgctgcagcctccggggccatgggtgtgtggctctgggagctgccgttccctccacaccccttagggaagtcctctgctcacggtgcccaccctggtcgagcccagccagctggagccttcctcccagacccatcggcctcctcgggacagtccagccccgtcctctggcccatgccctctctgtccccgcctcctgcccagccagcttcctgagggtccctgagcttgcccggctggccactcactgcctcatggtccttgatcacacacagacgtggtggtgtgctcgcctctggaggaaggctgcccgccgctcggggccgtcggtggcttcggagctgtggcagctctcttagggccagctccatcccctctccccggccctgctgagtgaagcgcacacgtggtaaatctgccccatcagtggggggttagtcctgtcatttggggaagcctgtgttggctgcatttattgttgtcgatattacttttaattaggacaaaattcaggcaccataaaacctacagttcagtgttttagcgtgttcacaaggtcgtgtgaccttcgcccctgatttcagaatgtttttatcacctctgaaagaaacccagtacccatttgatgacaccctcctttccccccttccgccaaccacgaagccacttctgtctctgtggattgacctggatgtttcatgcaaatggaatcaaacagcgtgtggccttcgcatcgtacttcacgtgctcagcacgtgtgttccagggacctcacttactcagcacgtgtgttccagggacctcagttactcagcacgtgtgttccagggacctcagttactcagcacgtgtgttccagggactccatttactcagcacgtgtgttccagggacctcagttacttagcatgtgtgttccagggactccacttactcagcacgtgtgttctgggctcacctgtgcttcttccttatgactgaatgctgtttattgtgcggagatcacatttcatgtatctgttcatcagtggatggacatgagtgtccatgtgcaagttgctgtgtgaacctgtgtctccagctctctcgggtgtagacctgcttgtggggttgctgtgtgaacatgtgtctccagctctcttgggtgtagacctgcttgtggagttgctgtgtgaacatgtgtctccagctctttcgggtgtagacctgcttgtggaattgctgggtcacgatgtgtcttcagctctcttgggtgtagacctgcttgtggagttgctgtgtgaacatgtgtctccagctctcttgggtgtagacctgcttgtggagttgctgtgtgaacctgtgtctgcagctgtctcgggtgtagacctgcttgtggaattgctgggtcacgatgtgtcttcagctctcttgggtgtagacctgcttgtggagttgctgggtcacgtgataattctgactttttaaggaactgccagactctttccacagcagctgcagcatttttcgttcttgtgagcagtgtctgagggctgcagacttccaacatcacagaacagtactcgtgattgtccatcttttttactgtaaccgtcctggtgggtgtgcagtggtatctcctggtggctttgaattgcatttccctgatgagtaatcatgttgagtgtctttcgtgtgcttactgggtatttgtagatctgctttgaagcaacgcttattcaaatccatggcacattttaatttttttttttaagagacagattctcgctctgttgctcaggccggagggcagtggtgcgatgatagctcactgcagcctcctcttgggctcaaggtatcctcccacctcccaagcagcagtgtctcacgtagctgggactacaggtgtgtgtcagcatgcttggctaattttaaaaagttttagtttgtaaatacagggtcttgctatgctgtagtctggtatcaaactgtaggcctcaagcagtcctcctgccttggcctcccaaaatgctgggattataggtgtgaaccaccatgcccaggctttttttttttttaattgttgagtttaaagagatctttacatattctggatgctagacccttattagatagatatgtaatttacaaatgttttctcttgttctgtgtgttgtcttcgcttttttgatagtgtcgtttgaagcactttttttttttttttttttgagacagggtcttcccctgttgcccaggctggagttcatggagttcagtggtgtgatcgtggttcattgcaacctcgacctcctgggctccagtgatcctcccaccccagcctctggaatagcagggactacagacttgtatcaccacacctggctagttttttttaagttttgtgcttcagctatcataaccagaagccatttcctaatcaaggtcacaaaaatttacccttattttttctttttagatttttatagttttagctcttacatgtaggtctttgaaatattttgagttaatttttgtatctggtgtgaggtaggggtcttcattcttttgcatatccatatctggttgtctcggtaccatttttgaaaagactattcttcctcattgaattgtcttggcatccttgttggaagttaattgaccatgaatatatagatttatttttggactcttgattctgtttcattatctatgtgtctgtccttatgccagtaccacagacctgatcattgtagcattgaggtaggttttgaaatcagaaagtgagagttccaactttgttgtcttttattcaagattgttttgactattctggtgtccttccatttctgttttgattttaggattagtttgtcaatttccacacacacacacacacacacacacacacacacacacacaaccctgctggaatttacacacaccaccctgctggaatctacacacacacaaccctggtggaattttgggggttgcgttggatctgtagatgcagttcttacttaataggggttggtcctggggaggggagcagatggcttggccctgtcctcaggggcatgtgatgtggctgggagatcccggcaagatgattttaaagcctcccttgtgggtttgtcagcttcagggttctagttatgatgggcaaactcatgtctgcagtttaagtaggaaaggaagtttaaaaacacaaaacatcaggtggtgcccaggaagggccgaagagccaggcttggcggcctcctgtgaagaggggtgcattcacctgcactgtgcaccgtgaggctcacctgcggcttctggggcctggcgtcctcctcctgctgcaccgccctcgcccagttggtgccaggcatgacctctgcacatcacaggtgtccagggcttgatacggctgggccaggcctggcacccagggaacctgggaggcaccttctgcgtggcccgctcgccacctctggcctgtctgctgcctgtctgcagcccttctggaagtgggcacagacctggcagtgttgtcaggaggtgggaggacacgtaggtgaacctgggcctgggggtggctccccccatgaggtgcgtagagttcctgtgaggagtgtgcacccagcagctcgtcgggtcacagcgaggtgcagcctcggctccctgcacacccgtcacacctctgcatgacaggcagagactgcgttctggatgtggctgccgcctgcggctcccagcacgtgaaacatggtgcgtgttgcacacacggcacgagtgtggccagtatgaactggagctggttttcttgaggtggagaaagccctgctggcttctctttccctcagagcccacggcactgtgaggagcggcatgcttccacggctcatctcgagggtgaattaaagtcaccccacgcccaggaccagaccttggctctgcaggcctgtggggatggatggcagctgcagaggcccctcgagagggacagagccttgagcttggagctctgtgaagtcgcaggctcggggcggtggtgccctccttcccctgctctggtatctcaggtcctgtctgctccctggtgcccccttccctgtatgctcttccctggccatgccggctgctctgcagagggcttcagggagggttgtggggagggcgcggggaggaggtgccctcatgggccagaactggcaggaggtgaggaggtgccatgcccccgcccaggcagagggactgcgaggtgctggaggagaccagatggggaggggctgggagagactgacattctgttcagattccaggctgtggagctgggccctggagcagccacacttggcggctgtgagttggcctcagggtcctgctgagtgccaggtccctgcacaccctcacagtccctgggggctggcggtggcattggcattgctgagggtcttggccaatctgttagggaagtggggtctccggggccgagctctgctctggggtgtggatagcacagcgtctgccgggtgctgcgggagccttttctgtggggatgtgggtcctgcaaatgtgagcaccagctgtgattaaatcaaggacagtgaacagcagcgccgtcatcttcatgagttcacaaaaacctattgctttatgtcttattaggtgaatttagaatgtatacagggtaggaaaagcagcagaaaatagcaggtgtgtttgggaagatcatcattactgcctgttacactgaataacttcaaaatcaaaagggttcctctctcaggactgctgctgaaaaacgaagtgcgagtgggtgtcctacagaaaaattaaaggaaagagagaaaggaaaggaaaggagagaaaggaaaggaaaggaaagaaaggaaagcacaccataagttcaccccgacaagcaaattggttgttggttttccttgcgcttgctggtgagacagccccgggggatttataactcgccttctcactgctttggtggtttgccgcctgtagtgggggccggttgccagggaggcgtattcacttccatggtggctcatgtccactctactctgagccctgagccctggcggctgagtcagggcagagcgggagcaaagtcgtcctggttcatacctgaaccgagaggcccggccgcggctgtggtctgcaaactcaccaagccatttcggcatcttttaaccacaaaggataggtgtgaggatgccttctcagttaggacagtttcagcagctggttcaggagcctgctgctgctcccctgggcttctcacctcacgattttttgtcctgctcgttgctgtcattgtctcggcttgtttggggaaatgtggcgtgcgcgttgtgggtatggccaccgccatcagtggggagaccatgattggtccctggggtgacacatgatcctggggagggaaggcgagggtcccaggggacctcttacggatcttatggaggagttggacttctccctccaccccgattcagggactgcgcttcttgaagagggttgtgagcacgtctctggtgggcttggaggccctgacctgctcaatgggtgagtgacaaatggtttttcatggtagccagggtctcccagagcccctggctgcctccctgggctgtgcggcccctcctcctcctcagagtcaccggcccagggctcagctcactgtgagtcggtggccgtgaaaatagcactggcaatggagggtcgtttccaacagttcagtgttattggagtagaagtttatataacaagagtgtattttaactggatgaaaatttactattaaaaataaacagaccttgccaaatggcagtgagtgcagggcagacgggagtgtgcagtgtgacttttgggtgcccaggccctgccagtggccgctgggcccagctcttgtttggagctcctggtggcagatgggctcttctatgaggtctgggagttctggtcagtgggatggcgtcacctggggctccttattcatgcagcacgtgtctgttgcatgcccccgtatgcctgggcctgtgctggccgtgagaattccacccatgggctctgggctgtgcttgggtcacctggtatgagcctctgccaccccgctccccacagcagcagtaccaacaccaacaagccattcacagcgctgctttacgacgtttgtgctgaatagagagtttggaatgtccctgcgtattttatagagtgagatggtacatatctaaagatttattttaattcttaaaaaaattttgttttgttttgttttcgagtcaaggtctcagctctgttgtccaggctggtgtgcatggcatggtcacggcttactgcagccttgaccttctgggcacaagggatcctcctgcctcagtctccctgagtgctgggattacaggcatgcaccaccacacctggccagttttaagtctgaccctaaacaactcaaggaataagccaaaggcttctctgaagcactttcatccagtcacttttaaccccatagtttgtggcaacacactccctgatgtgcacagtttgtaaggtatttggagtttatgggcccacctcaacacaaccttcccagatagctttggatttgtgtgtttagacagtggaacagatccaggccgaggcattaccttttggcccagatgtctaaaacaggcaagacaaaagccttcctgtgtgtgtgtatatatgtatgtgtgcgtatgtctgtatgcatgtgcatttgtgcatgtatgtcactgtgtgtgcatgtgtgtatgtgtgtatatgtatgtatatgtgtatgtgtgtatgtgggtctatgtgtgggtgtgtttgtgtgagtgcatgtgtatgtgaatgtgtgcctgagtttgtgtgtgtgtgtgtgtgtgtgcgccgttgtgtgtgggtctccgtgcatgtgtgtatgtgaatgcgtgtgagtatgtgtgtgtgggtctctgtgtatgcatgtatgtgtgcatgtgtgtatgtgaatgtgtgtgtgtgtttgtgtgtgccatttcctcctagttttgagtctctttgaattggaggcttgtgtgtggaggtaccttcagtggagtcttgcaggagtgaagaccactttgctcaatttcgtagcctggagcagtcgtagacaagagagccctgtggtcggtctcggggaggcgttgtagcctcaggagtgttctctgggtgtgactcacacctggccacatgtgtggtcgtccttggttctccaaggaaacctgtcaaacttaaaacagttttaagacattaatttgctcaacgatgttcaaatacttttgaaaaaattggtatgtatgcaaggtatgcatgatgaaactgactccagaagagagggagacactaaattgaccagttattaggaaaaaaattaaaaagattgatcgacttgtcaaagttgctgtcccaaaaaagctccagatgtaggtgtttccagagtggattctaccaaactgttgaggaacatccggccccagttccctttcaaccagccagcttatcagacagaaggaaaatgcagggatacggaggcccgacagaaggtggcaccgtgaaaacagctgtgcagttgtcttgctgttgcttgtgagtgaaaccatctcggcttaggacccaatagcaaataaactcgatccaatgtgttcatactagaaacgtaaggataagttcatgttccaaaaggttgagggatgtaattccctgttttcataagttaatagttcatcagtagaagaaaccttgttaggttatctcgatagatgctgaaaatgtatttgttaatattaaatgcctacttttgattgaaaaatgattattcttaataaaattaaaacatgtatttccataatataattttaaaacacagaatcaggcatttccactagtgtcagggacaagacaccccatgtaaccacagttgtgtaatatactttcagaagctctagctagtgaaattaacaatttaacaagagaaagaataatgtaaatattgaatactagaatggagagacgttacttgcaaatatgattgtgcatctggaaaacacaagagaatctattgaaaacctgtaatagtggtttatggagaaatagtaactgttgctaatcttgagctctgatctctcaggaggcacagggtattagtccggctcctgtaggctgcagtaacagaacccctcatggacggtggtgtcatttgccctggaatgtctggaggagggaggctcccgggtgggcaagcagctcagtgatgtcaccaggaaccagttcttcccctgtctccatccggccaccctcctgtgcaggtgacaccgtccttctcagatgccactgtcagattctcatcccacattctgcagaagcaggaaggaagcacgcaaaaatacccaaacaaccaaaacaaaataactctcttttacttgggcaacttttatttcatttattaattttttgagatgggggctcactatgttccccaagatggtcttgaactcctaggctcaagcacttctcccttctcggcctcccagaatgctgggattacaggtgtgagctgctgggcgcagccccttgggcaacttttaaaaacctttgtatggtgaataattttaggtttggttcctatgtttcccctgataggaacatcgtaaataaccatgcttcgtttgtcagagccaggatggtaacacgggacactactgttgaccaaactacaggctttatttgggttttaccagtttttccacccacctcccttttccgctccatgtaaacgtgtctgtggtgaagatgcggggctcggtctgatttccaaagctgcttttgcccctgtggcctgaagtccaacgattccagctttttattccaatatctggttatttaaaacatatttaatgttctctacatataaagcttattcagaaaagatttaatgtgaattatactgaattatatgctttcctttttgaatgatcatataacttagtgcttaattaccacatctggcaaaaaattaaaaaaaaatattggctgaggccgggcgcggtggctcacgcctgtaaccccagcactttaggaggccgaggcgggcggatcatgaggtcaagagatcaagaccatcctggccaacatagtgaaaccccgtctctactgaaaatacaaaaattagctgggtgtggtggtgcgtgcctgtagtcccagctactcaggaggctgaggcaggagaattgcttgaacctaggaggtggaggttacggtgagctgagatcgagccactgctctccagcctggtgacagagcaagactccgtctcaaaaaaaaaaaaaaaaaaaaaaaattggctgaaacaccagacatttttcctggtgttcacctggtaccacctgtggaggacccggctaagggttcctatgtgtttctctggaagccatttccatgtgtatcgatagcgaagtttgttttaatatttcaaaagttgcccttaatggctccatgagataacagaattattaagctgccttcaattaaagcctcaagttttccatttgtaaattaagaatttttgtggcctgggcacagtggctcacgcctgtaatcccagctactgggattactgggaggctggtaattgggaggctgaggtgggtggatcacctgaggtcaggagcttgagaccagcctggccaatgtggtaaaaccccatctctactaaaaatacaaaaaaaaaaaaattagccatccgtggtgttgggcacccgtaatatcagccactcaggagactgagggaggagaatggcttgaacccaggaggtggaggttccagtgagccgagattgcactattgcattccagcctgggcgacaagagtgaaactctgtctcaaacaaaacaaaacaaaacacaaaaaagaatttttttgagacaattgaagcttagtgaataagtacagaaattgtattgtcaaaactatgtaagtttactacatatatttgcaaagagcaaggcaacatagatcacaatatgttcttaccggcattttttttttttttttttttttgagacggaatctcgctcggtcacccaggctggagtgcgatggcacgatctcggctcaccacaacctccgcctcttggattcgagcgattctcctgcctcagcctctcgagtagctgggattacaggcatgttccaccatgcctgtctaatttttgtatttttagtagagacagggtttctccatgttggtcttactggtattctttttttgaaattattttaaacattgagcatctgattaattctcaccatacagcagagagtgttaagttcttatactttctacatgtttttcttttggattgtcaattctttttggttaaaaataataaaaattttatctcacatggtttcttctgttaatatgaagctgacatggtcttgtaaatgtttctgcattttgcttgtttttttgttagtttgtttttggtttctttgagacagggtctcgccctgttgcataggctggagtgcagtggtgggatcaatgctcactgcagcctccacctccctcccaggctcaagggatcctcccaactcagccccctgagtagctgggtttacaggaatgtgccaccatgaccgcctaattttgtttattttttgtagagacggggtctcagtatgttgcccaggctggtctcgaactcctgagtgcaagcgattctctgcctcagcctcccaaagtgctgggattacaggcgtgagccacctcgctgggtccccactgttttttttaattaaatttttagtagagatggggtttcgccatattggccaggctggtctcgaactcctgacctcaggtgatccactcgcctcagcctcccaaagtgctgtgattacaggtgtgagccaccgcactgggcccccactgtttttttttaattgaatttttagtagagatggggtttcaccatattggccaggctggtctcaaactcctgacctcaggtgatccactcacctcggcctcccaaagtgctgggattacaggtgtgagccaccgcactgggcccccactgttttttttaaattgcatttttagtagagatggggtttcaccatattggccaggctggtctcgaactcctgacctcaggtgatccactcacctcagtctcccaaagtgctgagattacaggcgtgagccaccgcgctgggcccccactgttttttttaattgaatttttagtagagacggggtttcgccttattggccaggctggtctcaaactcctgacctcaggtgatccactcgcctcagcctcccaaagtgctgggattacaggtgtgagcctgcgctctgctgatattttcttgttggtgactgcacgtttgccttgagctgtgagctctcatagaaccagatgaccatttgggctcactgttaactgtagcccttctgtggatgccccgtgggcaccttcgtatccatcagtttcatctctggccctgggaagcgggaggagttcgggtggagctggagggttttccttccgacgaggtatgtggagtccctctgcgatcctgtctggggaggggagaaaggggtggcaaggcttctctagctgtcactgggtccttgaacccccgctggcctggtgctgctgctggtgctgaccacacacagactcatgggagaactgggcaacttggccactgaatcttcattgtgggtgtttgctttgaatatttcgttttcagctcttgtgtttctaagtaccaaaacacttttttttttttgtaagaattccagtgcaccaacaataaaaccaagggaccaactgagccatttggaagtggtggctggggacacccatacggtggtgacacttctgggtgactggctggtgctgggtgtttctgggctgccaggacagcaggaggtgggggtgttctgtgccagtgagcttcgtgctgcgatgtggatagagggccgtccttccggccgctgctgctctcaggtcgcctctcatcggcacagcggcgcatcacacggcagcagcctgcctggctctcctggtgggtgggggctgagggatgaaaacgaggcactccctccccaccacagcctactcccgtgggttcggggcgttggaacattctccaaacccctcctgctgcctggccaggtccagctgggcacagtgcacgcccacctgctgggccctcctcaccgtgggctccgccctgggccctttggacaccttccctggccctgacagcagctacctgggaatgcagcatgaggcaggtgccttttgctgaatgaggtgaacagcaagagggagaaaaggagagatcgcctagcaaagcagcgaggccagaggctcctgccgagcagaggaggagggccattggcgcaaggacacacccatccctcatcacactgctgggacctgcctaccctctctgctggcacgccgggctctgccacatgggcctgtctgggccttgtcctccccagctgcggggaagggcttctttcagttccctttgggtgaacacagaggcccagctcctgccgctgtgtgtggttctgggtcactcaggaccactgataatcaaaaccaccaactttggactacacagagctattaaggagcttagctaaatttaaaaaaagtgcagctgatatttatgtcctttatgtgccagatagtgctgtaaggatgtggtgtgtctctaggtatgtcagccctgacgtttgtgccgtaaggacccggagtgtctgcaggcagacctgtcatccccgcagccctgacgtgcgtgctgtaaggacctcgagtgtctgaagggagacctatcatctccacagccctgatgcctgtgctgtgttgctccattgcacagatggaaagacaggggctagcgagtgagcagccagtgtgaggccctgcggtagcaggtggagggggcagggtgtgaactgagctggggctggctctggcatctgagcttgttaacgaccgactgggctagaggcagagtgggccgcaccctgaccaccacctctgtcccccactgctgtgcccctctgtctcactgtttcctgtggtccctcctgactagaagagactcaggcctgctgagtagcatgcagcacaggacgagcctgcagagccctcttgggacttacacactggggatttgacagctcatgtctggcaccgcagatagtctaggaaaaggtgactcatccaagagcctggccggaaacccacagggtattggcccaggtgtgccgagaggctggccggagggaccattgtgatactcagaggaaaacgcctgtggcccatgggggggccttcagaagaatgtcggagtttctcagctggcaagatgcccctggtggcaagatgcccctggtggcaagatgcccctggtgtggggcccctcacctggaccagaggccttccctgagcttctgttttgcagggaggtgcctgagctgcacagcttgcctgggaggagtcgtggtttctgggggtggggcctttcgtagggctgtgctggtgctgtcctgggggagggggatgctgagcacgcccgcccggggctgctttccctgggagggatgctgaggctgcccagggctgctttccctgtgaagcagcgtgacccagggctcttggtggggatgtgccgtttgctctttttcatgtgtctagcccttgggaagtgtttttggtactgctggttctcatgctctagtcctggtaatgggctagtgtgcttgttctggctttactcggtagcgtttataacaggacaggattcagaggacactgttgctgagggaaagtttgtgccacttaacctggtgttgcttctggccctgcctctgctgggcgtctgtctgcagcgtgccttggagtgtttcccttgctctgctgattgctgaaatgcaagacctgggcctctggaatcccattgaaagaacttgtttaaagaaacatcagctcggtttatttcatacacagctactttttgtagatactgaggttttgttgagatgttggggtgtacgtgccgtgtgaggttttgttgagatgttggggtgtgcgtgccgtgtgaggttttgttgcgatgttggggtgtacgtgccgtgtgaggttttgttgagatgttggggtgtgtgtgctgtgtgaggttttgttgatgttgaggtgtgtgtgccgtgtgaggttttgttgagatgttggggtgtgtgtgccgtgtgaggttttgttgcgatgttggggtgtacgtgccgtgtgaggttttattgagatgttggggtgtgtgtgctgtgtgaggttttgttgatgttgaggtgtgtgtgctgtgtgaggttttgttgatgttggggtgtgtgtgctgtgtgaggttttgttgagatgttggggtgtgtgtgctgtgtgaggttttgttgatgttgaggtgtgtgtgccgtgtgaggttttgttgagatgttggggtgtgcgtgccgtgtgaggttttgttgagatgttggggtgtacgtgccgtgtgaggttttgttgagatgttggggtgtacgtgccgtgtgaggttttgttgagatgttggggtgtgtgtgctgtgtgaggttttgttgatgttgggttgtgtgtgctgtgggaggttttgttgagatgttggggtgtgtgtgccgtgtgaggttttgttgagatgttggggtgtgcgtgccgtgtgaggttttgttgagatgttggggtgtgcgtgccgtgtgaggttttgttgagatgttggggtgtacgtgccgtgtgaggttttgttgagatgttggggtgtgcgtgccgtgtgaggttttgttgagatgttggggtgtgtgtgccgtgtgaggttttgttgatgttgaggtgtgtgtgccgtgtgaggttttgttgagatgttggggtgtgtgtgctgtgtgaggttttgttgagatgttggggtgtgtgtgccgtgtgaggttttgttgatgttgaggtgtgtgtgctgtgtgaggttttgttgatgttgaggtgtgtgtgccgtgtgaggttttgttgagatgttggggtgtacgtgccgtgggaggttttgttgagatgttggggtgtacgtgccgtgggaggttttgttgagatgttggggtgtgcgtgccgtgggaggttttgttgagatgttggggtgtgcgtgccgtgggaggttttgttgagatgttggggtgtgcgtgccgtgggaggttttgttgagatgttggggtgtgcgtgccgtgggaggttttgttgagatgttggggtgtgcgtgccgtgggaggttttgttgagatgttggggtgtgcgtgccgtgggaggttttgttgagatgttggggtgtgcgtgccgtgggaggttttgttgagattttgggttgtacgtgccgtgggaggttttgttgagatgttgggatgtgcgtgccgtgtgaggttttgttgagatgttggggtgtgtgtcctgtgtgaggttttgttgagatgttggggtgtgtgtgccgtgtgaggttttgttgcgatgttgggtgtgtgtcctgtgtgaggttttgttgagatgttggggtgtacctgctgtgtgagggccggccttgtttctgtttactgatgcctcctgggcctcacacagggaggggtgaacagaggtcttagggagggtgtttttctcttttttttcttttttttttaattttgtattttattttattttattttattttattttattttattttattttttgtagagatggggtctcagtattttttttttttgagacagagtctcgctctgttgcccaggctggagtgcagtcgtgggatcttggctcactgcaacctctgcctcctgggttcaagccattttcctgcctcagcctctggagtagctggggggtgtttttcgttttaaaaggcctggaatgtggtttctgtgagagccttccggaagctctggggaggtgcttgtccttgttgctgggccttggggcgtgaggcagctggtaggcacggacttctggtggtaaggagctgtctagcctggaagcctgcagcccacctgacgatagaaacgcaaagcacacctcagcatatggtctgcggagtcctcccgggggctccggattcggggtgtccgtggaaaacacatgatgccaggtccacagggtgacaggtgacaggtgacccagccttcaggctccctgtccagccgctgggactctgttgaatgctgcattcttcctccgcaggctggcgtttgcaccggcctggacacatcgcaaccctgacctgtgtgctgaagggcggccgcctgatgtctgcctgcttttggcatttggacgacacctggtttctgcctgagggagggattggtcctcttacctgatgtgtagctcccagaaaggcttgtgcagaactgacatgtggctagcctgctcccagccccccgcagctcacagggtcaggatgggaggggagtacaggctgaggcaccaggcaccacaggggcctgcacgtcactgtcagtctggttaaacatcataaaattagtaaccaaaccgatctaaccacattcacaatcatttggaaactggtgaaaaggggaaagcaatgagcactatcctacttccctaacccaaccacaagcagcggagccagttatttcttggcttctctgtggaagtgcgtttatttgaaatccgtaaacagtgtttatcttggcgaggaggaatcctgcaccagcttagacaaggaactcctgacgcctcagcgcctggccctcaggacagcctttccccggttccctgtgtccctctggccgtgggctcccgcgtggtgtgtgcggcccagggccctggcagtggggagtgtgtggtcccctagtgacaccgcctgctctgtggctgttttctttctttatgattgtttgcttctcacactccctgccaaaggacctgcttgatgccactgacatcgcggctcttgtggactgtggagctggtggctcccctctcctcctgaaccacgagtactttctggggaaatgatttcacccactgccccctgcccacatccctccaccacagatgccacctgacctgcagctacccactgggctgctgtagctccttggtgaccagactctgcccttccctgccagtgtgtgtgctgagcctctgagatcacggcccagccctgggccctccctgtgcaggtcaggctccaggttgaggccaggtgagggagccgtggtccggggctgtggctctgctcctctccagccctcttgccagaggtgggaggtgctggtgtgcccctcctgcccccaggacagcacttctctgtctgcttcctgaggctcacagcacagctcctgtctgcagggagaggagagtatggagaggttcagaatgcgggcttggacaggtgctgggtggcaccccgagcgggttttcctttcaggtgtggggctgcaggttctagtgggttctccacacagtcctggccctggatggaaagagggagagaatctagccttgggctctgggctgtggtggctccctgaggccttgcagctgggaggggtcctctgctcctgtccccagtgtgcgtcccccactgcatccaccctctctggggcctaaactgcacatgatatcattcattaccttttttcccaaccagctaacaggatgcaaacgagagtgttctaaatgatcttggaatacaaacttgcatatgttactttcaagcattaaatgtttaccttcttaaataaatggttgtcacctcattttaccttctgaattaagcagatctctgatgcacccagcgtcttgcctgtgctgaccggccacagaccctgggagagtccccagctgggatggggagccgagggtcgcacccagactcacaccccagaacccgggttttagagtgagactgacgagggccaccaggatgtgctctgccggtgtctgccctgttcccagaatgctggtcacacccgctgaattgctgtgagcccagtggtgggctgagtgccacggtttgaacgcacctgtggtgcctctgacccatggggagagggcttgtgctgggctccagaaaactctgagggacctctgaaaggtggcaggactgtggggaaggggttttggctgaggctcagcagaatgaaggggccaggagtggagggggcagagggacccccaggcagggccgctgcacctggagagaagctggaaggcaaagactgggtcgtggtgccctgagtgcaggtgggttgctcccccccggcacgccgcccgtggtgcatcacgttctgttgcagtgtctgctcctgagcatttcaggacgggactctgatcatcctccaagccggcctgcatatcctagttggtatctgagttaagtttacacaggagatatggggtcaaaaggtggtggggtacctggcatcctacaggtggcattcctgtatctgtgatttttgttcacacgtttatctcgggctgcgcatgcccggccccgggccagggaacgggacatggccatgaaaacagtgggcccctgctgtcttgaggcccatcttttggtggcccctgttttggtggccatcagggaggggcctgagccccccatggggtcaggtggaaagtggcagctcttagaggtgacatagggacccttggaggtgacattgagacccttggaggtgacactgagacccaaaggaaggacaggagggcccctgaggagatggatgaggtgggaaagtgcagccagcatgcctgtctcagggaggcattgggtgttgtgggcagcggtggttcgtggcctcctagtgacctctcctggtcactggacagcagcctctctcgcccatgggcgctgctctcggttccagcctcgttggttactcggcagccgtcagactcctggtttgagaagggagtgtgggctccctgtcctcgaggggttcagctgtgccatttgggggtgctccatgaagctggcagctggacagccgtgacactggtatttcttgggttattttagttgtaggcatgtttgctaaatgtcagcaatttggcctcactcaaaatttgttttgagattaggctcagtattgaactgcattgaatgaagtaaaccaggattctaaaattaacgtgtgaggggaagttatttcaccattgggagattattatgctctctacagaaagtgttgcagaactttgatttgacagcaataaaaatgaaccctctccttttttgtgtctggttttagctcagtgccatataaatctgggcattgaaggttcaagggtccaggcgctccacctctgcccctgtggctgtgtggtgctctgtctatggggatctttgtagcacaagcccgagccttatcaaagaccctggttctctccactgggtgcatgtggagcacctcggccggcattcagtgcccactctgcatgccgcccccgtgccagtccccggcaggtgaaggtgagcaagaccttgcactggagcagctctgtcaggagagtgtgcgggggctggaggggctctgtcaggagagtgtgcggggagtctcatccaggagagtgtgcggggactggaggggctctgtcaggagagtgtgcgggggctggaggggctctgtcaggagagtgtgtggggcgtctcacccaggagagtgtgcgggggctgggtctgggcttcaggggaggagagtatgtgggggctgggtccgagctccaggacacccagaagagtatgtggaggctgggtccaggctccaggacaccaggagagtgtgcaggggctgggtctgggctccaggagaggagaggagactctcgacggtgggcagccccagggaatggcatggtggctggagggggtgccagcagaggggctgcggccgtagtcttagggagggtggcaggcactgcagaggtgctcagtccgcctgccttctgtggtgcagggtagaggtcgggcctcacaggctctgggtttaagtgctggagctgcctctcattggccctagggaagctgctcgtcctcttgtgcctcggtttccacacctgtatggttgaacttgttgcggtgatgtaggaaggggcctgatgcccctttgtgtggctcaaggctggtgcgtgccgggcagctgtgaaatgagctgggcttctgagtggcagggaggcagagccgcgccggttgcgggctccaagctgggctagctggaggcgggggaaggagagtgtggggggaggtggagcctgtgggccggtgacggaggggaccgcggggcggggtggcgagtggggctcctggtgtctggggctgcagctgtgggtggctgtcgtgcccctgagtgaggcgtacctgttgggaagtgagggcatgaactccgttttcctccttttgagtccccccgccccagtactgtggtgaaagcagctgcaccggtggctctggtgggagcagtaggggtgtgggattgtgcagggcagggaaggggcagagagggggccggagccaaggagtggactctgggcatcccaatggtctgtgtgaggatgaactgggctgatgcttgctgtgggccagggacactagaagggtgagctccattctccagaagctctgtgcttctgcggctggctccagccttgccctgcggtggtggggcctgcttccccggccatcctgccctgtccctttgctgtaggtggggcctcagtgaggctgggagatgatactctggtgctgcccagggctggcctcccatagcgattgatggggtgaaggagaggagaagcccggaagattgagcaggtttttaattcacagggccctattttcgtctgacccctgcttcgtcatccacctgcctctccgtggcgcctggttcttggtgctccccttttgcaaacctgaagctcagccaccatgccttgcctgtttaaaagttttttttttttttgtagagatggagtcttgctatcttgcctaggctggtccactcccgatactggagtggagtctgcccccgggttgtggcccaccttcctcccactgctggcaggggctttgctggcagctcccagggctgagttttcattgaataatctgcccagaaggttccaggggctgcatctgggtggcttgagagtagaattatttggcaacttgcagtgggttctgtttaagaaggaaaagaaagcctgctgggtccctgatatggtttggctctgtgtccccacccaaatctcacgtcaaattgtaaccccagtgttgggggagggacctggtgggaggtgattggatcctgggggccgatttctcgtgatagtgagtgagttcttgtgagatctggttgtttaaaagtgtgtggcacttcccctttcacactctatctcctgctccaccatggtaaggcgtgctttcttcttcttcaccttccgccatgattgtaagttttctgaggcctcccagccatgtttcctgtacagactgtggaactgtgagtcagtgcaacctctattctccatgaattaccagtctcaggtaagtcttcatggcagtgtgagaacggactaatactgtcctggaattggccatgcttaggggaaagagtcacaggaagggccctagagatcatcaacttcagcccttttatttttgattcttaaagacacatgtgagattgttttataaaaattttgacttacaaggctgaaagaattttatagctaacacttgtttatctgccacttagattctatcattaatgttttactctacttgttttagcacattttcctctgtccatcagtcattgttgattttgatgcatttccaggtaaattgctgacatcagcatacttcccccaaatgcttctgtgtgaatatcactagctagagctcagtatttaatgtttttcttttgacataaaaattatacacagcaaaatatacagatcctaagtacacatttgctgagttttgacgtgtctgtttaaccaaaattgttatcaaaacaaacacaaagcttgaccatcacccaagacccctcccccatacctttccctggccctcccagggaggtggctcttgtgggttttccctcacgtagcttcgcctgtcggaggacgccacattcacagatgccctctctccatatggcttcagtctcttgccagacatttttgagatgggtccatattcttctccgaaccagaggtttgttccttttcatggctgaatagtagtcctttgtgggagtgtatgactatgccatagcacatttagctgttctcctgtcgacaggagtttcctgtccggcctcaggaaacttacaatgatagcatgttttaattatgatgagcaaagactctatgaacattcttgtacacattttttgtgaacatctatttttattttcttaggcaattctacctaggagtgaagtggcaatgtcctggagtagatgtgcatttagttttatcagaggctctggaactttcccaggccaattctgctggtctcttcctctgacagtgcgtggaggccttgactgctcctcacccttcccccatttggtgttcttgttttttcagttttagctcttctggcgggtgtgcagtgggacctcactgtaggttttattggcatctctttgaggattaaggaggtgagcatcttttcagctgcttattgaccattcatgtatttcttttgcaaagtgtctgttcatatcttttgcccattttttttgagttgtttgttttcgttagggagttgcagggggcctttatgtactctggataccagtcctttgtcagatgtatattttgtgatactttcccccagtctgtggcttgcctgttcattttcttttttttttgagacagagtcttgctcagttgcccaggctggagtgcagtggcgcgatctcggctcactgcaagctctgcctcctgggttcatgccattctcctgcctcagcttcccgagtagctgggactacaggtgcctgtcaccatgcccagctaatttttttgtatttttagtagagacgggggtttcaccatgttggccaggatggtttcgatctcctgacctcatgatctgcccgtctcggcctcccaaagtgatgagattacaggtatgagccactgcgcccggcctcattttcttaatggcagtttccatgagcagcagtttttagttatgattcttctatggttctcgctttctgaggcagaatatatctgtgttcactgccaggccatgaagaccttcttcctttttgccttctttagaagctatatgcttttactgtctacatttgggtttttgacttatcacaagttaatttttgtgtatgatgtgagatagtggttgaagtttattattattttttccatatggaattcagctgttccaccactgtttgttgataacttttttttttttttttttttaaagagacagggtcttgctctgtcacccaggctgaagtacagtggcaacacggctcactgcatccttgacctcccgggctcaagcgatcctcccaccttaggctcctgagtagctgggactaaaggcatgcgccaccatgcccagctacttttaaaaataatttttgtagagatggggtctcactatcttgcccaggctggtctcaaactcttgggctcaagcagccctcctgcatcgaactcccaaagtgctgggtttacaggcacgatactttgtttttctccattggattgctttggtatttttgttgaaaatccaggtataagtgtgctttatttctggattcgctattctgctccatcagtccattgaattttattccaggtccacatgcctcagttgtgttggcattagagtaagtcttacagtcagtgcacatccctaacttgattcttgcagaggctgctttggatattccaggcctgttgcattccgacatagatgttagagcatcttgtcaatttctgcagagtgcctgctgagcttctggctggtattgcttggaatcgtagatcagtgtgcgggggagtgatgtcttcacaatgctgagtcttctgattatgaagatggttgtcacctcatttactgagggtgtctttaatttttctcagcagcattttgtgattttcagtgtagtggttttgtgtcttttgtaaatgaattgttacgtagtttatgttttttatgtcattataaatggtatttttaaacgtgtgattttccagttgtttactattagtgaatggagatgcagatgcatggttgtgtactaatctcgtgtcctatggcccctctgaaccgtagcttctgtggagccgtgggtgacagttgtaaacagttggcatttgcagatagagccatgtgagcacctttttctccaggcttgaggccgttcctttcttttcctgcctcgttgggctggtcaggacctttggcatcgggtgagtcggcgtggggagctgggcctttctgccatgctcttcctttcggggaaagtattgagtggttcaccagtaaggatgtgagtatctggagtgtttttgtcattgttcctttaaaaaaaaaaatgtcctttatcaaagggaggaggtttccttgtatttcatactctgctgagcgttttcgccgtcgaggaatgtcgaatgtgctcagatggtttttctgtatgtgctaacgtgaccccacactttctcctttatttggctaacttggtaaattacatcgctgtttagttaaacgaaactagtgtttctgggctaacccctacttggtcacattatattcctttaaaaaatctattttgggccaggcacagtggtttattgctgtaatcccagcacttttggaggccaaggggggcggatagcttgagcccaggagttcaagactagcctgggcaacgtggtaaaaccccatttctacaaaaaattaaaaaaatcagccagttgcagtggtgtgtgcttgtagtctcagctactccagaggctgaggtaggaggattccttgggcacaggaggtagaggctgcagtgaactgtgactgcgccacgacactccagcctgggctatagagcaagactgcgtctccagaacaaacaaacaaacaaacaaacatttctgcccttgctttgtgtacacatcagtgagagctgttgacctgtaatgttgtttctttgccttgcctctgtgatgcctttgccggttttggtgttggggttatgctggcttcagagattaaccaccaaccatttggaaaacactaaccatttggaaagtgtcatccctcctctgtgtttgaaaagagccatctgtgattgatgctgtttcttctttaggtgtttaatggaatttaccagtgaaaccatctgtgcctttttttgtgggaaggtttttgatatgactcaaatttctttaatagataaaagttttctattcattatgtgccaagttttgttttttaaggaataaatatattttaaatttattttctgaggaaaacataaacttaaaaattatttaaatgatcagtctacttcatgtaaattatcaatttgttgatacaatgttcacatattctcatattattcttttaatgtctatagtgataacccctctttgattcctgatagtggtaatttgtgtcttttattcttgatcattctacctactggcttattagttttgctaatctatttaagaactaaaaaaaattgttaatttttaaaattgtctgtttttgtgttaatttacttatttttgagacagggtctccctctgtcacccaggctagagtgcagtggcccactcacagttccctgcctcaacctcctaggctcaagcagtcatcctgcctcagcctcccaagtagatgggactataggcacaagcctggttaagcttttaatttttttgtagagatgggggtttcactgtgttgtctagactggtctttcctggcctcaggcctcccaaagtgctgggatttttctgttttctgttttcttggtgacatggaacagttatttccaaggaacttgtttaatcagaccttcaggggcttctagaaggtcgcagttttaacaggactgcagttgattccaggttttgattaaaagtgtgctttggggaagcaattttaaaattcattgactacatatacaataaaatgaaattagaagtcatgtaactgagccaaaagtttttttatacaaagttattaacaggtacctaaataaaatatgttcttaaaaatgaaataaaatgaaatcatttgtatacaagtacagtagtcctccctcatccatggtttcaggtaccttatgtcattgcggtcagaaactaggtaagatattttgagagagcgagagaaagcgcgagtgcgagcacattcatgtaacttcttttgccgtatattgtcctagttgttctattttattatcagttattatttatctcttactgtacctaatgttaaactttatcatggatatgtatgtatgtataggaaaaaccatggtgtatatggggtttggtactagctgccgttacaggcgtccactgggggggtcttggaatgtgtcccctcagctacgggggatgcctgtgtgctggactggaagctccacaatggtgagaagcattaccagggcaaagccaggagcaatgatgacaaccctggattcccaggtctcacggagcctcagataccaccatctctttcttcatccttttcttgcacttcattctttttccacatcctctgcttctggggtggcccctgtcttatttcattttctgtgtgacgctccccacagatgtgtgtcgtcagcggctgccctgcaggtggagtgtcctttcgggtgtccactgctggttcctgctagcaggagcagatgacactgcagcctctgtccaagcgtggatcccaccctgagggtgctgtgtgtgtctgggcttccctctgggtcattgtgaagcagcctcacctccttggaactggaggcctccctggacctcgccgcttgtccctgagacctggccagcgcttctgtccgggggccagtggtcaggtgatcttagggacacgtctgccctttgggaaatgggtgtgcctctggagacccgggcagagactggcctcgtgcagctggggctggacgcgccctgtgcttctggggtgctgaccctcctgggccatcagaggtggctctctgtcaggagaagcagacttcgggccttctccacgtctcccccacctccgactctgttactgcagctgggttttgtcagcagcagaacagaagccagcaccctccaggacggggacttggcacacgtttggttttttgtgaggagagcagggggctctctggaccatgggcggggctgcctccctaggggctcacagctccgtggcgacctcgtcacccttccccacagagtgccgcatggctggcagggtgggcacgacacgccgttccccagaaacccagttgacttcctctgtgggaagtggtcagccgagtgtctggtgctgcggaacatctggaggcgtcacttggcatgggggactggaggtcaccatgggtggcctggaagggtggccggtgacgacgggctcctgtgaagtcactggaatctggagtgaaatggctggttacggatacgtgcgccagagcctcgtggtgatggcgctgctggtgattttaactcttctgtgcttccctcccgctgaatttccccaaatttctgaaacaagtatgattgacttttgaaaagcaatttccatttaagttgaacagagaaagaaacatgcatgcatgtcaggaggcggcgcagcgcggcgaggccacggttctctcctgcgcgtcagaaggcggcgcagcgcggcgaggctgtggttctctgcttgtgcccactttgtgtttgtaaatagcgagtcggagtcggagctggagctagtttttcatcatctgtcggcttctgcagaccaatgtcatcattccccgtcccctgggtggcccctcccccgccatcgttacgctgtcatcagcaagatcactgtcactaggactgcgtgtattccagtcacagctgagccatgtagtgtgctatgacttgattttttcagttttaaaaaataatacaaacacatttaaaaaacaagagagccagtgtgaaaacagtaggcaatgaacagtgtccacagaactcagagggcggacaggagatggacccagggcagcttgggcccgttcctcacctgttacctgctggcagcaggagtgagggccgtgtctgggcaggaggggctggtacatcctcacaggggtggcagggggtccgattgaggagcagttgggtggcccagcctgcttctgctgctgccagcacagcccatggtgtgctctgtggggctggcagggatcctggcatggcctgtgtgattcgaggtcagaaatcatgacggggaaaggatgcggccataccagacggaacctttgtccacagggtccctgtaaccagagctgttgggacgcggggagcaggcgaaatttctgggccaatgtttaaacctgcctgaactccagcctctccctctttgttgtttgtatgccgtgctcagaagctagccagaggattccgttcagaaacggggcctgtagataattgcgttttgtgtatgccatgatttcaaagttatacttgtgttgtttcttagaatttggccgggcatggtggctcatgcctgtaatcccccagcactttgggaggccgaggcgaggcgggcagattatctgaggccaggaattcgtgactagcctgaccaacatggtgaaatcccgtctctactaaaaagacaaaaaattagccgggcatggtggtgcacgcctgtaatcccagctacttaggaggctgacacaggagaatcacttgaatccgggaggcggaggttgcagtgagccaagatggcgccattgccctccagcctgggcaacaagagtaaaactccatctcaaaaaaaaaaaaaaaaaaaaaggatttgatcctctctaatgataagttgtcattttaaatagattctagggtatgcagcccttttcccagtggattcagtttgctagcagacatcttttggagaaatttgccatcatgtgtagacttaagctgattttgtctctgtatttgatgaaagaggaggatatttctgaattatctctcatcagaaggtatctgttcctctgtgtccccgttttcttttatagttctcttgctctgtgaggttcagctaacaggaataatattctgagagaaaactgaatttcgagacagctctctgtcctactcgggagacgcagcttgcagactgggtcctttctcacgggccttcctcctgcaccgcctggacacagtttgtgcttctcatttggtggaaggcccagtcgttacttccttttacaaaactatttttagctgcaatgtatttatggctgcacagacaagaggacttttctcatgaaaggaaatgcttttccacagggataagcgagtcgtgcggggcaggatttcctgaggaatcagcagcacggccctgggttcccaccccccagcacagcgcccaccctgtgtccccaggaggccttagcctgtgctgcgtctacagggttaaggcacccacagtgctttttttttaaatgacttgtatttgaaagttttaaggaagtctttggaaggaaatgagttgacgttctggtgtgtgtcaccatcggtggttgccgtttcttggagtgtgggttgtggtcccgctttctggtgtatgtcgccatcagtggtcactgtttcttggagtgtggggtgtggtcccgcgttctgtgtgtgttgtcatggtggtcactgtttcttggagtgtgagatgtggtcccacgttctggtgtgtgtcgccatcgctggtcactgtttcttggagtgtgggttgtggtcccacgttctggtgtgtgtcgccatcggtggtcactgtttcttggagtgtggtgtgtggtcccacgttctggtgtgtgtcgccatcagtggtcactgtttcttggagtgtggggtgtggtccagggtgtgggggctgctgcccaggcctcccggcttttgtggattggaatccacatctgcgccacgtgcagggttcctgcccagtctctgaagcccactagtccttctgaccaggcgttcactctgcctgcctgctgagggagcgctggggtcgtttgacaggcggcacccacaccctgcagggccacgtgcgcatgcgggctcgaggaagctgtgggagtgccttcccactaggcttgctgtgcgggttcttgaggcaaagggaaggtggagtttgcagaaggtcctggatggtgggtcagaatgtgggcacctggttccaaaccctgagggtccctttgccagggcctccggtaggggccgcggtccaagccgaggcactcgcccctcctgtccttcctcaggccccactggccacagcctccactgcttccagcattttcttcctgttgggacggagtcctgccttgggaagccttctgcctgtagaggtttcttgccggtgtgcactgcacagcttgtgggtcttgtgtgtcccagaaccccgagtgctccctgccagccagggcccaggcagtgcttggtgagtgggagagggatggccctgctgccctgtcctcccaaacggtgttgtctcatggccttcagagagcagacagaccagaggtggcctcggactccaagagacgctcctggctttccactctcgccctgtgcagaccagcagtgcgaggggtgttgtggggttagggggtgacgcaggttatcccatgccagggagcccacagcctccacccagggccacgcctggcgccagcacagggaggtcacagaggaggctggagcagggcgtggtgggagggcaccgatgtgcaatgccatgccaggcctcggggagcccctcgacgagacccatggctcctgcacggatggtttcacattgtcaacacggctggaaaaggacacggtctacaagtggaggctcgaaggtggctgagagttatggcacctgggctttccagaagttggcttgaaataattggtcaaggtatgtggctggcgagggacgccagggatgcggcctcctgcagtggtcagatgccgtcctgtgggatggggcctcctgcagtggtcagatgccgtcctgtggggagggacagtgtggccttcatccgtggtgacgccgtcctgtgtggggactgacagtatcgtctccgtctgtgatgatgccgttctgtgtggggagggacagtgcggcctccatgatgtcccccacactgtccgcgctaggagtgcaggtggtttccagcagctgtctgccggcagggaggctgggaagtcaggctggctgtgtccaacacctcctggggcacagaggagtgtgggggagacactgttggaacacaggtgtggacattgcgacacgtgtaaagatgtcagtggggcctgcgttcgaggatgttccgaccaccatgctggtcgcaccctccagcgatgggtcctcggtgcagtgatctcaagcgtcgcgtctagaatcaccgcaccccgttgcttccagacagcctcggtagcgttgagtcccctcttcctcttcctggatgtacacaggggccacgtgccgtctttggaggtcgtgagtgtttgagtcttttcatctcggcccctgctttgctctttctggcattgccatctgaaagagtctagcccacttgtctttagggcagcctgccgtgtgggtcactgtggtcattgctcgctccgtggttagctgtgtcctgtccgtggttagttaggtagttggttgctccatggttttcacttagagattttgggcaggaacattaccaaggtgagcttgggcgcttcttgtgccatcagctctgggggcccaggctgctgtcacagggaaggtggcatcgccccactcccagcttggcgggaggaggctcctcatgtatgacgccatttggggatcttctgtgactcctctatgggtcctttgcccgtttttccatcagttttgttttgttttgtattttcccttgacttttaagagttctttcaattgcaagaagattaattatctgtgatatatattgcaaatattttcaaccagtttgacatttgtcttttgattttgccatgccaaagtttaaaaaaagttagagttgactcactctttttaaggattgtgtttggattttgagtcatagtttatttttccatatgaactttagaatcaccttgtctggtttgggctgggcggggcgggccgctggcaggctgtgggacaggccagggctatttctgcgctcgcttggagaggactgacagctctatggcgccgagtcatggtccctggaaacaagagaggtcttttcatggactcaaagcttttgttcgtttccttcaggaatgtcttaaagtttttctcttacacaatgttcacatatgcaaaaggtcgtttgtgaggttacctttttccttgttgcattggaagcgggccttctcttccagcaggccttccgcctggttgttgttggtgtctgtgatggctgttgttttgtctgttaatttcaggacctcctgctttcctggattctcctgttgtctgtcctttttctgcctgcttctctgcccctccaggtgtgctgtgacgccatctgcaggtgcagggagctcagatctcctttcccggagctgcgcctctgcatgtgttccctttcgggtctcattccctcccccgatatgtcaggtgaaatggcactgggcgtaacgggcgcccttgctgtgtttccttgtccgagggaatgactgggtttgcccaggaggaaagagccggctctgggatgaggtgtcagcgtgtgtggggtgggatgtttcgaatccacgtctcatgtggtattcagcgtggtattcagcgttgttgctattaaacaagaaataataacagtgaaaagacaaagcgtttcacttataaggctagagtatagaactgtgccataaatgagggaattacggaaggattatataaatccaaaaattattgaataaaatacagaaaaaaaccccagaaagacagcaaattaaggaaatggcaacagtttgaaaacataaatgaagcacacatttggtaaagctacctgagagagggaggggcaggttgactgcatagtagtgtgaggaacaggaggattcatacagtttaacaatccattgtaagatagtttgttaactattcggggaaaggtttaaattggggtcttactatagacattataccaaaacaaaatctaagtggggcaaaaatgtttgtttgtttgtttgtttgtttgtttgaaatggagtcttgctctgtggcccaggctggagtgcagtggcacgacctcagctcactgcagcctccgcctcccgggttcaagtgattctcctgcctcagcctcccaagtagctgggactacaggcgggcgccaccacacccagctatttttagtagagatggggttttgtgatgttggccaggctggtcacaaactcctgatctcaggtgatccgcccgccttggcttcccaaagtgctcggatcacaggcgtgagccaccgtgtccggccaaaaatgtttaaaataatattaattttattttctgatacaggcatgtatagtcctaatctgaggcacacgcaggactttctgtgctgtgtaacaggtggccacggatgtcgtggcttaaaataacaccagtttgttgtttcatgcttctgtagggtggagtcagggctcagcctgctgggtcctttgctcaggtctcacgcggctgcagtcaggttgcctgttctcagtgggctgtgttctcatctggaggcccaactaggcagggcctgctctcagactgcctcaggtgcttggcagatatcatttccctgtggttgtaggactcacagcttcttgtgccagagcctatcggggagagactgccctctgcttacagcctcagacctttagactcactctgaagtggctcttcgataagatgagacccacccaggattatctcccttttgattaacctaagatcagctggagatggagcttcattatgtctgcctgacactttcacctttgcctcagcctatgcatgggcgcgccgtcttccccggttcataggtcccacctgcactgaggacggggattacactggatgtgaatgccggggcgtggggagccctgcgggcctgctgggatcctgcattacaattttatgacaaatggttgttgactttaattgaagaacttttcagtaaacttaaaaaaaattaaccttcatttattacttctccatcattcttcctttcctatgtacatccggaattttgagttgtgtcatattctccttcctgaagaactttttcaacatgacttacagggcatgtctacttttttgtgtgagaaagtttatttttctttcactttcgaaggatgattttgctgtacacatgactggggtcggggggtagtccctccagtctcttcttgctggtgtggtttctgttgacaagttcactctaattcttgtccttgttcctctatagctaagatgtatttttttcttgcttctttcaagattttctttatttgtgattttctacaattgggatatgatctgcctaggtatagattttttggtatttattctgcttgatgttctctgggcttcgtggatctgtggtttggtgtctggcactaattttggaaattttcaaagctcttatatgttgcaactgtaactggaattctttaagtttgccaggaactataaagataatcattagacttttttagatctgttggtgtgatcagttgtattagcagttttcctaacagtgaatcatccatgtctgtatgtatagaatagtcactcgcttgcttactatgtgtgaagtttttaacgtgctgctggatctttggggtgtgtgtcgtggcacacacatgagtgcacacatgaggctggtttgaaggtttcccttttgcacatacgctgtcttcatcctgtttatatgccaatgttatgtttgtctcataataggaacttagaactttccttcttgtgctgtgatctagagctgtgctgtgtagtaatgtagcctctaaccgcgtgtgattattaaaatttaagtgaactaaaattacatgcaataaaaaaactgttcagtcaccagtagcctcatttaaaggacagacgtggctagtgcaggtctagaacgtgtccatcactgcggaacgtactgagacttcctgcgtcggtggaaacattccgtcatctacaccggccagtcctgtagcaacggcctaggtggtttttgaacgtgtgtgtgtaggtgtgcccacacgcataggcatgtggtgagtgtgtggggtgcgtttgcatgcctgtgcacgggtggtgtgtggtgcatgcgtgtgtaggtgtgcccacatgcacatgcataggtgtgtggtatgtgagtgtgtggggtgcgtttgtgtgcctgtgcatgggtggtgtgtggtgcatgcatgtgtgtggggtgcatatgtgtggcgtggtgggtgtgtgtgtgcctgcacgtgtgtggcatgtgtgtttgggtggttgtctttgctggcccagttgtagcagctcttcctgaggtggggacctctgccccacagctgcctgcctggagctctctggtaggcggtccccctgccagccctgcaggctgtatgaggttctccatggttctccccgtctgccatttgccctttgttattgctcttagtgacaggcagttatttaacattctggccaaagtggctttcgttgttttcttcttcctaaagcctttaaaattaagagttaaaaaataggaaagtaatgcgtgatgattataggcatgttaaaaataaagaagagaaaaagaaatacctctgcctcaaatacccactccaacctttgggcgtttttttctgtctttttcccttttcctattgagaataccattgggagtgctgacagcgctcggcatgaggggctcctgtgacgtgctggcaccctttctggagtccccgcggaccctcaggggccagctgtgcctttgcattggccacagcgaggaagggggccagggcatgcagtttctgcagggccacgtctgcaggtggccatgtgggctgctcgcgccggtgggggcttgtgtgaggtgtgatttattttgtgttcaatccatttttttagagtataagtgtcttccatgtctatgtgctcattgtaaatctttactttgataacatatacctaatacttgttattttaaccactggtaactgtgtagttcactgccgtcctcacctacattgtggtgtttgttggtgagtgtgtagctcactgcctttcttacccacattgcggtgtttgttggtgagtgtctggctcactgcctttcttacctacattccagtgtttgttggtgagtgtgtagttcagtgccttccttacctacattggggtgtttgtcactggcaccctgtctatctccacgtcatgttttatccaataaatttgtttttgattcctccctcttctttccttccgtggacgccctgtgtaactttctttattgaggtgccttctgtaatatttttctgcagtattctaattgtaattctcttataaatgatgctattatgaacttctttgttgacagagcatttttgctctttagaattacttttttaaggactgactcccagaaatagagttccacatttgaaagtaatgagttttttttttttaacatttcccatattttcatagtttttgtattgttctttgagaccaagagaagaatttttgggtgtttaagagaaaaagaaggcatgtgctttctttcatatggtggctgaacacacgcagagctgcttggcctgtgggctgaaatttgagcatttctttaagacctagtttgtttattttttactctcacttcagtggttttaaaaataactacattaaccaaacgtggctgtacctccgaggacttcttgccagagctgctcctgggaaagggttcagtctctctagtttgtgcccatcacccagtgggacagctacatggacgtggcatggcggcgtggcggcatggcccagtaaagaccagtttgggcaggatgaatggccctcaattaaagggtgtcgtggtaggcagggtctaattttataaaagcttctggcacatgtacattcaaaatttcttttttgtctttgatcttggcagaagaggacacccaagtgtgtgtgcgtgtgtgtgcatgttttgttttgttttttttttttgagatggagtctcgcactgtcacccagctggagtgcagtggcaccatctcagctcactgcaacctccacctcccaggttcaagcgattcccctgcctcagcctcctgagtagctgggattacaggcacccaccaccatgcccggctaatttttttgtatttttagtagagacagggtttcactatgttggccaggctgttcttgagaattcctgacctcgtgatccaccctccttggcctcccaaagtgctgggattacaggcgtgagccaccacgcccggcccatgtgtgtgtgcatgtttgtgtacgtgtgtatgcatgcatgtgtgtttgtgtgcaggctcctgtacatgtgcgcgtttgtgtgtgtccatgtgtttgcttgtgtgcgtgtgtgcatgcgtgtgtgtgcatgtgtgtgcatgtgtgtgcatgcacgtgtgtttggaggctcctgtgcatgtgtgcatgtgtgcgcgcatgtgcacgcatgtgtgcgtgtgtgcacacatgtgtgcgtgtgtgcatgcgtgtgtgcatgcacgtgtgtttgtgtgcacgctcctgtacgtgtgtgcatgtgtgcatgtgtatgcatgcatgtgtgtgtgcaggctcctgtacgtgtgtgcgtgtgtgtatgtgtgcatgtgtttgcatgtgtgtgcatgggtatgtgcacgtgtgcatgtgtgcatgcatgtgtgtgagtgtgtgtgcgcatgtgtgcgtatgcacatgcacttgtgttttcatggccgagggtttattttctagtaatttgaagccctaagtgacagaaccttttctgttcttctcagtgtttgtgctactgtcctctccctcttctctcagtctcagaagatgtgtcagggtgtctggatgtggtctgtcagctcatccacaaggactcgggccatctcccctgttcctgcaggtggtgggaagtttctatatccacattttcttcattgaggatattgtggtttgttgtgaaagtgcttacattcagtgggataaaatttgagtcacatattaggatattatattgttatttcagttgtgaattttaagaaattatataatttcttacacatcttcaggaatgcattaggcaagttaaacaatagtgttacatgttggggatatgtttatatgcagagcggttgtaaaaactgtattaacatctgtgtgcattgcacgtgtctgcttgttcctctgtttccagtgttttgtcctttagtgtgtgctgcagcgctgtgctacgtgtagtgaccctgggcctgtggtgcgtcctgcggggctgtgctacgtgtagtgaccctgggcctgtggtgcgtgttccggggctgtgctacgcgtagtgaccctgggcctgtggtgcgtgttccggggctgtgctatgcgcagtgactctgggtctgtggtgcgtgttccggggctgtgctatgcgtagtgactctgggcctgtggtgcgtcctgcggggctgtgctacgcgtagtgaccctgggcctgtggtgcgtgttcccgggctgtgctacacatagtgactctgggccttttgggcaggtctcagatttactgtctgttttaatttcaattgcagtttttgtttgatttcgcttgggcgtctgggacctacccttcctactgctagggtcagaactttctctttttttcattttatatgaggtgagtaaagtgcagctctcagacgtgtggagactcagtgtgtggctcggctgcttgagtggcgctgtggcgatggagattacctccacctttttaatgcggtaaaatgggtataaaattttccatcttaaccatgtttaagggtgcaattcagtggcatgaaatgcattcataatgttgcataaccatcactgtcatccatctccagatctcttttaatcttgtaaaactgcagctctgtcctcgttaaacactgagtccctgtctgcccccagttcctttgtcaccaacattttactttctgtctccatgaatctgatgactccagatatctcacatgagtgcgatcatacattctttgtctttttgtgtttggcttattttccttagcataatgttctcaaggttgttgcatagtcagaatacccttcctttttaaggctgagttatgtggatagaccacaattgtatccatttgtccgtggatggacacttgggtttcttccagcttctggctgattgtgggtgtaccgatatctgtttaagttcctgctttcagttcttttgggaattgtattagttcattttcatgctgctgataaagacgtacctgagactgggaagaaaaagaggcttaattggacttatagttccgcatggctggagaggcctcagaatcatggcaggaggtgaaagacacttcttaaatggctgcagcaagagaaaatgagagagaagtaaaagcggaaacctctgataagcccatcagatctcttgagacttattcagtatcatgggaatagcacagcaaagaccaacccccatgattcaattacctccccctgggttcttcccataacaggtgggaattctgggagatacaattcaagtgagatttgggtggggacacagccaaaccatatcattccatccctggcccctccaaacctcatgtcctcacatttcaaaaccagttatgccttcccaacagtctcccaaagtcttaactcattgcagcattaacccaaaagtccacagtccagtcttatctgagacaaggcaagtccctttcatgtatgagcctgtaaaatcaaaagcaagctagttacttcctggatacaatggaggtacaggtattgggtaaatacagccgttccaaatgggagaaattggccaaaacaaaggggttacagggccgatgcaagtccgaaatccagcggggcagtcaaattttaaagctccaaaatgatctcctttgactcctggtctcacatctaggtcacactgttgcaagaggtgtgctcccacgatcttgggcagctccgcccctgcggttctgcatggtacagcctccctctcggctgctttcatgggctggcattgagtgtctgcggcttttccaggcacacagtgcaagctgttggtgaatctgccattctgaggactggaggatggtggccctcttctcacagctacactaggcattgccccaatagagactctgtgtgggggctctgaccccacattacccttctgcactgccctagcagagattctccatgagggccccacccctgcagcaaacttttgcctggacatcgaggcattttcatacatcttctgaaatctgggtggaggttcccaaacctcagttcttgtcttctgtgcacctgaaggctcaacaccactggcagctgccaagtcttggggcttccaccctctgaagccacagcccgagctgtatgttggccccttttagccacggctggagtggctgggatgcaggtcaccaagaccctaggctgcacacatcatggggaccctgggcctggcccatgaaaccagtttttcttcctgggcctctgggcctgtggtgggaggtgttgccatgaaggtctctgatgtggcctggagacattttccacatggtcttggggattaacaacaggctccttgctacttacccagatttctgcagctgacttgagtttctccccagaaaataggttttgcttctctatcacatattcaggcttcaaattttccaagcttttatgctctgcttcccttagaaaactgaatgcctttaacagtactgaagtcacttcttgaatgttttgctgtttagaaattccttccaccagataccctaaatcatctctcaagttcaaagttccacacatctctagggcacgggcaaaatgctgccagtctctttgctaaaacataacaagggtcaccttcgctccagttcccaacaagttcctcatctctatctgagaccacctcagcctggattttactgtctgtattgctgttggcattttgggcaaagccattcagcaagtctccaggaagttccaaactttcccacattttcctgtcgtcttctcatcccttcaaactgttccaacctctgcctgttatgcagttccaaagtctcttccacatattcgggtatcttttcagcaataccccactcctggtaccaatttaccgtattagttcattttcacactgccagtaaagacatacctgagactgggaagaaaaagaggtttaattggacttacagttccacatcactggggaggccccagaatcatgacaggagacaaaaggcacttcttacatggcagtggcaagagaaaatgagaaggaagcaaaagcagaaacccctgataaacccatcagatctcatgagacttattcactatcacgagaatagcatgggaaagactggcccccataattcaattacctccccctgggtccctcccacaacacatgggaattctgggagatacaattcaagttgagatttgggtggggacacagccaaaccacatcaggaatatagccagcagtggaattgcttcactgtatagtaattctgtttaatttttggaggagctgccatttttcttcatagcgatggcaccatgttacattcccaccagcagtgcacaagggtcccatttctccatctcatcccaacacttattattttctcttttcaattttaatgttttgtataatatccatcgtatccatcctaatgggtgtgaaatggcatttcattatggttttcatttgcatttccttaatgattagtgataatgaacatcctttcatgtgcacgttgaccatttcatatgtcttctttagaaaactgtttaagtcctcttcctatttttaatggggttgtatgtccttttgttgttgagttgtagaaggttaaaaatatattctgaatattaacccgttagcagacacatgacttgcagatattctcttccatcctgtggcttgtctttcatcctattgatagtggcttttgatgcacaaaagttgttaagtttgatgtcccgcttgtctgtttttccttttgttgcctgtgctttggatattgcatttaagaagtcattgtcaaatccagtgtcacaaagtttctcccctatgttttcttctaagaatttttatagttttagatttttgatccattttgagttaatttttgtctgtggtgtaaggtaagaaaccagtttcattcttttgcatgcggttatccagttttcccagcctcatttgttgaaaggactgttcttttccccagtgaatggtcttggcaccactgtcaaaaatcatttgaccatattacaaggctctttattccattccattggtccacatgtctgtcttgtgccaggaccacactgttttgactgctttaggttgtagtaagttccacataaggaattgtgaggtttccaatttgttcttcttttttaaggctatttttggctattcagggtcccttgagattccatatgaattttagcgtggacttttctgtttctgcaaaagaaagtcattgggattttgatataaatggaattgaatctgcaggtttctttgggtagcatcagcatcttaataacgttaactccagtttgtgaacatggaatggatatctgaatttctttcagcaacattatgtagctttcagtgttcaagtcttgcctccttggttaagtttatttctaagttttttattcttttcgatgctgttataaatgggattttaaaacattttcttttcacattgttcattgttagtgttgtttgtgtgttgatcttatatcctgccacgttgctgaattgctgaatttttgtgacggagtctcgttctgtcacctaggctgaagtgcagtgacacagtctcggctcactgcaacctctgcctctggattcgggtgattctcctgcctcagctcccgagtagctgggaccacaggcatgcaccaccatgcctggctaattttttgtatttttagtagagacagggttttgtcatgttggccaggctggtcttgaactcctaacctcaggtgatccacctgcctctgcctcccaaagtgctgggattgcaggtatgagccactgcgcccggccttatttctatcaattttttggtggaatttctagggttttgtatacataagagcatatagtctgtgaacagagataattttacttcttccgttcccattcgggtaccttttctttcattttcttgcctaattgcccaggctgggcctaccagtgcagtgttgaatggtagtgatgagcgcgggcatcctggtgttcctgctcttagagggaaagctttctgtcatccactattgagtgcattcactgtgggtggtaatctacaggcacgttctctctcagaggtcctttctttccttttgtgtctagaaaggctgtttttctaccacgatgacagcaatttgcttattttctctcctgattcctttgtggtttcaagtcttatgttcatatcttctgaatctatctggagtttagtttctttgtggaataaagaaaggatctaatatagcattttaaaagtaaatatttaactagtcctagtattgcttgtcaattaatgcctcttccctcaacagtgtgaaatgcctcaatctctcctgctgacgtctctgccttccgaagctacaaaggggaagagttgggccttctgggcggctgtgggccaggctgcctctggcatcttggtctctcatgtgggtattctctattaggggctgtatagcaaacacgctaaagatcatctcagttttttagtacttctcactaaaatggaatcattttataaggtctgtttctcccttcccttcagaatatgcactatagaaaattacagatcactccagctcccactacccagaaagaacgcttgtccacgtggaataaacgtcatcccagtctgcagagctccagcaaggaggacaggctgtgcttcaccagttaaatttaatcctgctcaaattgtcaggagaaacagacactgaagtgaaactcaaggaacttctgaatttgagataaatatttattggtgcaagagataaagctctacaattcctctaaggataagaaaacttttctaaacttgaagaatgtagcgtttaagaatacattttaattttagagcacgtttatgaatgctctggtttggaaggtatcatgattcttaggcagcctctcagctcctgggccccacttgctgatttaatagattctattacttgtgttttgttagtttgtaacagagacactctgttccacctttccctgcctccgttttcagcccttggttctgtactgtgtggacatggtgtgggtcactgtggtctttcctttctgacttctgggctctgctgcatcacctgagttctgccctgcgccgtcagggtcccctctccgtccagccctgcgccgtcaaggtcccctctccgtcccgccctgcgccgtcagggtcccctctccgtcccgccctgtgccgtcagggtcccctctctgtcccgccctgtgccgtcagggtcccctctctgtcccgccctgtgccgtcagggtcccctctctgtcccgccctgtgctgtcagggtcccctctccggcgcaccctgtgctcctgtgctgtcagggtcccctctccatcctgccctgcaccgtcagggtcccctctctggcgtaccctgtgctgtcagggtcccctctccatcctgccctatgctgtcacggtcccctctccatcctgccctgtgccgtcagggtcccctctccatcctgccctgtgctgtcagggtcccctctctggcgcgccctgtgccatcagggtcccctctccatcctgccctgtgctgtcagggtcccctctctgacgcttgccctgcaaacatcctcctttcccgtgactgctacgctcaggagcgaggatgcagtcagaccctgttttgttgcctctggagcatccttctcttcctcttccccccgtttgttatttggtgaggtttggggggaaaggggtgtcttaatcttccttatggtgtgtttgcccagagctcaatagtagttgaaaaggttttcttgtcatatcaattcctcaagctatgctacttgcacactgtggtctgtggggctgcatagtgaaatgtccttttcctggatggagggaagacagagaaggaacatgatgcagcctcactgctcaggatggaaaaacgctgggattaggggtcacctattggtctggggaagctcagtgacccagggaaaattgaactgatggagaagacagtatttgatcagacctgtgagcagtgaaggcatgggggctgttgccagtctgcaaagagagagtgcaaaggccctggggccagaggaccaaatgtctgagactcagagcaaagcaggtggagcggagggcagggaggccacgggctcagggcctggtggctgtgcagacctggaaggcctttgctgtttatcctgagagagcaggagggccctggagggtggatccacttgtgttttctgagaatcaccctggctgcctgtggagtgtagactggaagcaggtaaggacagagcagggagatccctgaggagggagtgggaagggactggggatggggaagaagtggatcccccaggagggagtggggaaggggctggggatggggaagaagtggatcccccaggagggagtgggggaggggctggggatggggaagaagtggatcccccaggagggagtgggggaggggctggggatggggagtgggtggatcccccaggagtgagggggaagcagctggggatggggaggggatggggagggcattgatcccccaggagtgagggggaagcggctgggggatggggaagggacagggagggagtggatccccaggagggatgggaaaggggctggggatggggaggggatggggagggtgtggatcccttggagggatggggaaggggctggggatggggaggggacagggagggcgtggatcccctgggggatgtcctggaagtgacacagtggcactgaggccaagggaggctggtgggatggtgggatggtgggatggggcccaggaggccctgggagcttccaagctggggtcagccaggcagacgcagcagcgccacgcgggccagaaagtggcccctgggcagggccccatggtcaccgtggccgtcacagtggccccgactagtgttggggtgtgtgccaaaggcaagaactgaaggccttgagggccttgtctttttttcacgtttcttctcttccttctttggagtgtttttgctctcatctttcatttagacttttggtctaattatttcacagcctttgagtgcctcctcataaacagtcagcaaacacggatgtctttgtttagagcaccgtgttaggactgtctgggcttattaaccttagtggatccacagtcaatgttgggggaagtcatatccacggtttaaatgaggtcatgacccatgaattgggctggagcgcgtgttactggggcgaggtgcacacagtgaacggtgtgtccaggtgtccgctgtcacatttgtgcgtttggtgtttagggtggctcctgggcagggctgctgggcacgcagctgcagctggatgtggggctgggaccctcgatggggacttgctggtaggagctggggccaagggaggctgtccacgtgggctgagggtcctcagtggcgggacagcggcgtgggtcagtcgcctcccctcctgccgggtcctcagtggcgggacagcggcgtgggtcagtcgcctcccctcctgccgggtcctcagtggcgggacagtggcgtgggctgatggcctcccctcctgctggggcggttgcgtgcgtcccacgaggaggtccctggacccagagggcagggcatgggggtgctcagagccgcagtgggcgattctctcccttcgcgtgtgtgtgtgctggggttgtgtgtccttgaagcctggagccagggtgttctcggctcggtcctgtgatctgtgaagctcttgtttcttgtcaggttttttatttttcattaatttatctaaaattcagtcttcctgctttttagggttcttagacccgtcagcaagtgaacggaggagcgcgcctggtgtgtggccagccttgcgatgctgttgtgtttgcgtgggcgcggagtctgggcccagctgcactggcggcctgcacgccttggccccatgcccacggccacggaggctgagaccagggcaggggctttagtcccgatgggagcgggggcagggccttgtttattgtttttaatcgcggcaaaaacccacaacattaaatttaccaccttaaccgtttccgagtgtgcagttccttagtgctaagtacattcacgttgttgcacggatctctagaacttgttctctcgcaaaatggaaactctacccttttagatgctgactctgtcccctcacggtgggcgatgttggagctggggtgcttcctgagcgtgggcggcttgtgctgagtgctcgcgctcagcctcgtccgcggtgacctccctcctcttgggtttgaatggctgtgctgcccttggccggagctggcacagagcccaggagcagccaggtggcctggggctcagcggagcggtcagggtggagagcgactgggccgtcccttctcctgaagcagtggcattttcaggcttgcgcttagctcctccgattctgtccaggagcttcctggggcctgggtctctggcggggctggagtttccttgcgtgtgtgcacgtgtgtgcacgcctgtggcatgtggtaggttttctgttgatggctctagcaagtgctttctgaagattctgacagttgtgacggactctataaaagccccttgctcttcaccccaaacacacagaaatgccatatgcgaccatgatgttttgtactccacaaagctcagctttgtctagtgcctgtgaaggggctttggctcaggcaggggcgggtgtggaaaggtgccaccgtcttgcttgttgaagctgggttactggctgagccgtctcttccctgggaggctggaggctggagcaacacagagccttcccctcctcgccacccgtgtgggggctgcgcgacgctgcccgagctttcctgagacagagtgcatcgtgcaccatgtccctgggacagcacagagcggagcccccacacagagcggggtccccgcgtgggcctggggtttccccgtgcgggtggagctcctccatgcggggtgggcccgggctgcgcctctgctcctgccccacgttgtcttcacaggagcttgtcctggctctgtttagggctgtgccattggtctgactggcttttctttttcttcttaatttacagccagaaaacctgcagaagaactggcttcgggaattttaccaggtaagaaccactgaaacgtgttcttttggattcattacttagccaataaggtgcctttttgctttggcattcctccatggagtctggtgtgtctatggggagcgcaggcctgggctgtggctgggtctctcggctccgctgcctgtgctgggcaacatgtttctgtgtcacagtcggtccactgcccgcctgccggtgagcctggccagatcctcctcgggctcactgttcacattccggctccctccccgctccccgcggggttcagagaatcagagaacctgggggctccctccagggctgggtgagcatccccagtggggccgtggagagctggcagcgaggctgggtgtgctcctcaccaggtccggtccgtgcagcgcactctgtgcagagagtgggtgctgggctgggggaggcgaccggttggagggtttcgggctggcactgccaggccgaggcacggacccccctgtctaatatggggccggtgtttatggagcccggtactgtgctgtgctctggtgtggacgctgcagatgccactgtgaagagacaggctggtgccctcgcaggtcttcatggaaggagccacctggggcctgtggccgagcatgtgtgcctgtggggtggcgccagaggcctctctgaggactgggtgcatgggggaggccaggcaggcgaggagggcaacgtggccatgggcatgacggtggccaggctcggctccaggggctggtggtgaggtcagcttcaggatggggtggcctggacggtggagctgctcacatgctcagacccacgcaagggctgagcccgggactgaaatcctgtttcaggtgtgtttggctgctgattggagatgggctggggaggccagagtggaggcccaggggccctctgtgagggcatgggggtgtgggacctggggggtggcccgacctgggcctgaggtgctgggccagaggtggagctgggacagccaggagggctggggacctctgtgccctcgggcctgtgtcctgcctgccagtgctcccatgtggtgaggctcccagcatgcaatggtgctctgtagccggcatccaagtccccccatagggacaacggcgtgtgtgtgcacgtgtgtgcgcatgtgtgtgcttagcacctatgtggtgaggaagccattgttctacagggacctgataaatctctctccgtagagtctttggtcagatgtgcaaatgagagacatctttcccttttgaaaacatatatttacaaatcgaaataatagatatgatgaatttagctgtaatgtgtgacatcatctgctcagcgctcacttggagaaagaggacactccaggagttgaagctgccgtgccacccccatccacggtgctctcatcatctctgtcctttatgtcaaccgcacgtcgggggccagtggcgggggcgggtttgccttgtgaggtggggtcttgctgcgtgtgcctgtcggggagacccacatccttgcagaaccttcgtcctctcctggtgtgtctcccctccagggatccacaggttttccctcactgaatgtttaggtgtgtgtgaccggcaaggagcagaacctgccgcctacacagctgaaatcagaatctgcccctgtgttttggtgtttttcctttttgaaaactgtctgctgcttttgttgttgttgttgttgtttttgtttttgagacggagtctcactctgtcacccagactggagtgcagtgttgcgatctcggctcactgcaagctccacctcccgggttcacgccattctcctgcctcagcctcccaaatagctgggattacaggcacccgccaccatgcccggctaatttttgtatttttagtagagacggggtttcaccacgttgaccaggctggtcttgaactgacctcagctgatctgcctgccttggcctcccaaagtgctgggattataggcatgagccaccgcacctggcctgtctgccgcttttttcttggtttattttattttaattatatttaaattttgtcccaatcaagccagcggcagccccgcaggagcagagttttaggagacgtttacagtggctgggcctgacccgcagttcctgatggtacagtgcagccatggcggacaccgaggtcccggcaacagctcccaacaaaccctgggcttcctcacaccaggcagtggccaggctctacctggggctccaaaggcctcttctgcctcatggaggggcacgtgagccccacctgtgagggaccggaaaggtcgatgtggaggaagcccctgtccccacgctccagcccctggcaattgtttccctgtgtgcgtggccccccgaatcctgggtcccctctgcccctgcagctctgtggagcccagtgatgggggtggggggtggggggcggttcgtgaacaggaagtaggggttgccccgggcctagctccgggcctgcacacctggtgggctctcttcaggctggaccatgtgctggacttcccaagcgaggtgctggccctgggacatgtgacctgagcacagagagctgcaaaaaacccagagggcctgccagtggacgttggcgtgtggccccagccagctcgctgcagggcgcaggtgtggtggggagacctggggctgctccagggtctgcagcctatgctggccagcgtggggaccacccagtgctgggtcggctgggcccagccatccacatcccactgatgctcaggcacccacaggctgggccgtggcagcttctctgctctgctcctcaccatccagacagctgcatctgctgcagggtttggagctggtgtctttgctcactaactgaagaagctcttgttctccagggtttatggttgggtttgggatgaggatgtaggcagatcgcttggagaacagctgaggcctgaacaggaaaaaacatctggaaaggggtcttttgagattgggacaaggagaggtcagcatcaggaggatctcaggagatgaggagtgcaggggagagaggccctgtcagaggaggggagggaggtgacgtgggcagaggagaggccctgtcagaggaggatgagggaggtgagttgggcagggcagaggccctgtcagaggaggatgtggggtgggaggtgaggtgggcaggggagaggccctgtctgaggatggtgagggaggttaggagttcatgggagaggccctgtcaggggagagtgagggaggtgaggagttcatgggagaggcctgtcagaggaggatgagggaggtgaggtgggcaggggagaggccctgtcagaggaggatgagggaggtgaggtgggcaggggagaggccctgtcagaggagaatgagggaggtgaggtgggcagggcagaggccctatcagaggagggtgagggaggtgaggtgggcagaggagaggcctgtcagaggagggtgtgggaggtgaggagttcatgggagaggccctgtctgaggagggtggaggaagtgaggtgggcatgggagaggccctgtccggggagggtgacggaggtgaggtgggaaggggcgaggccctgtcaggggagggtgagggaggtgaggtgggaaggggagaggccctgtcaggggagggtgagggaggtgaggtaggcaggggagaggccctgtcaggggagggtgagggaggtgaggtgggcaggggagaggccctgtcaggggagggtgagggaggtgaggtgggcaggggagaggccctgtccagggagggtgagggaggtgaggagttcatgggagaggccctgtcagaggagggtgagggaggtcaggtgggcaggggaaaggctccatcagaggagggtgcgggaggtgaggagggcaggggagaggccccgtcagaggagggtgtgggaggtgaagtgggcaggggagaggccccatcagaggagggtgtgggaggtgaggggggcaggggagaggccctgtcagaggagggtgtgggaggtgaggagggcaggggagaggccctgtcagaggaaggtgtgggaggtgaggagggtaggggagaggccctgtcaagaggagggtgtgggaggtgaggtgggcaggggagaggccctgtcagagaggggagagggaagtgaggtgggcaggggagaggccccatcagaggagggtgagggaggttatgagttcgtgggagaggccctgtcagagaggggagaggcgctgtctgaagagggtggaggaagtgaggtgggcaggggagaggccctgtcgggagggtgtgggaggtgaggtgggcaggggagaggccttgtcagaggagggtgagggaggtgaggagttcatgggacagctcctgtcagacaagacctgtggtagagaaatggtgtcttatcacatggtgagcctctctttcccattttctgtcctgttgagttagaattgtgatgttgtgttttgtggggtttggggaggctgtgaaggtgccctgttttgggggttcggggaggctgtgcaggtgccctgttttgggggttcggggaggctgtgcagggggcctgttttgggagtttggggaggctgtgcagggggcctggcactcctagggctgctccaagctggctgatggtggtttgggctgaggcccggttcccctgctggttttgctgatctgggacagtggcgctggctggaggggcccttgccccttgcctggccgtgtgcgtggccctcggctgtgaggggctgggctgtggctggagcccatgtccgctctctaggcttcctggtttgtgttacattttggcagcaacagctgtgtgttaagctcaagcttttgtttgttttcttttaagatggaggccttggggcagtggggtgggggttggaattctttttgggttttgggcgcatccaggaggggccggcagtggggatgggtcctggctgctctgtcccatggagcagggacagttcccgcgcattcgggtctctgcagcctgttcagtgtgggaccgtctgcaccagaggccatgggggagggcagtcttggggagcaggcggcaagaccccaacttgacagacctcagatccaaggctcaggccgcccagaatccccacgtacatgtcccatttctttcatttctttcccttttacctttttttcttttacttatggcttaaacagttactgtgagcgttgatagtagagttcgccagtggtgctggaagtgagttctgagcgaggtggttcctcctgtgacctgcagcccctggaacgccacggcccacaggaccccctccttcccgagtccccccgcagggccccctccttcccgagtccccccgcagggccccctccttcccgagtcccccactgaacagaggccctgctgggcggtttgtgggacctgacagaaaggtgggcagggctcttggaggtggacagcagcacctggcgtcctttctggagactcagcctttatgaaagacagtagagtcatttgtaaagaaaaataatgaatgatggtttgctctgtgcagtgtgtcatttttcctggttgcaaaaccaaattttcttggttttcttggaaaaacctcttcagaaggaagaaatttcagtgacacttagaacagagaattctcaaaagtgagatttcagcgccaatccccactctcgatttcaatgccaatccccactctcatgcttgttttagcctgactttgtttcttaggctatcagccagttcagcggctgcactgaggggcctcgggctggtgggtttctggcagtgagtgggcctcgccagggctggatcagacacctggtggtctccatgaccagagcccactgtgccagcagctcaagggcaaggggtggatgagatgcctcgacactgggcctctgactgtttcgggtgtttttaaatcctagagtttccattatacaattatttttcaaaatagccttgaagaagtggcttttatatagggaagaactaaatatgatcttcatggtcttttagaaaccctttctgtaaaacttgatccctgtagagagtgcaggagacagcgcagaaaagcctgtgtgtgcctccatcgccagtcgtgagcaccctcgacgcctttgggacccacggctttcgaagattaggtccagaactcagcctggcactggagagcttggcacgccttcccaagtcttgagtccccaggcagagcctggacggcacgatggctcatgcctgcaatcccagcactttgggaggccgaagcgggtggatcacttgagctcaggagttcgagaccagcctggccaacatgatgaaaccccgtctttactacaaatacaaaaaattagccaggcatggtggtgggcgcctgtaatctcagctacttgggaggctgaggcaggagaatcgcttgaacccaggggtcagaggttgcagtgagccgagattgcaccactgtactccagcctgggtgatggagtgagaccctgtctcaaaaaaataaatagataaacaaagctgcagagcctgggctcaccctgtgctggcctcctcagctgtcctgtccacccgtccaggttccgtcctctctcctgagaatcagactcacagactcatcaccaggggttccagaatcttctctatgtcaggaggggctcaggccccaaacacaggagccagcccccgctgctgtcttcagaatgcttatggcccctcccacattcctgtgttaacatcctgcccccaaggtggtggcctcaggaggcctggctctgggggccgatgagatcgcaaggagaggactccatccccatgaatgcaatcagtgccctgaaagaagaggcctgagtgctgcctcaccccttctatcctacaaggacacggcaagaaggtgccgtctgtgaagagtggaccctcctcgtggaatgggctggcctcgctcttatcctcccagcttcaggtgccctgtggagcacacgtctgtggcgtaggccccgcaggctgcggtgttttgttgccgcagcctgagtgaagagaacgccttcccgtgacgcgtccagcgttgggtcagtgtggaggacccgataagaacgcttgctgggggatgccaggctgcactcagatggagggatggtgcgtggggcaagagggagccccgagtctgggcctggagctgctgccctctgtccccacagtggcccgatccacgtctcgagttgctctgaattcccagcactgtctcgtggcggcccgcagcccgtgggccacaatggagggcttcatctcagaagcttcccatactccttgcctgtcttccaagtgtggcgtccggaaccagctcaggatgcaactgctggttttagcctttaaaaaatgtgcaccctggaagcacatgggatgctgtatgaggaagacttctgtgtggctttcacacgtgacttttctggcccaccgagtttccttctaaacccccaggcatctggggtgaaggcccgtggccgctgctcagtggagttggaggaagtggctgctgggtgcggggaggctcctgaactctcggaacctggaagttcactgcgcttggtttgaccgaaggggtgggacccagcctgcattcgacacacagctttgcggctgcatttctgcccctggtgaagcagctgggcaggcccctttgcttgagggccccgtctttggggtaggaactggccctgctggagagtgggcagctgggactgaggtgggcacccttgcttgaagctaagaagacccaggagaaggggcgggctttgaggacagagtgggccctgggtcagtggagtgtaggcactgggttggtggaggagctggttggagactgaggggctgggaggccccaggctggggcaagggggtgtctgccgctctgggcggctgggataaacaaagctgtgcagctgagcctctcagctgagaggctgcgaccttcatggcctggtgggcctggcacctgaggccctgggcctggggaacaggggcctcccctcttagtggtgatgggcttcaccctctgtagctgccggttccgggtcctgtggggagcggtgagggatggtcgtgtgcgtcgttttaggagcatgtgtgtgagcgtgaggatgcccatggccagtggacatgccttcctcctgtccttgcagccactggaggggaagcttcttgtccttaagtcagaccgggaggcagacgggccctgaaagaaccacagggtggcgtgggaggcagctgcagtgggaggtgcctgtgctttgttggttgtgaacaagcatccaagggaggaccacagtggcagatgtgcagtgtggggcatgtggcgtgcagggacgccgtgggcgtggtgtggggcacgtggcgtgcggggacgccgtgggcgtggtgtgaggtatgtggcgtgcggggacgccgtgggcgtggtgtgggatatgtggtattgggaacatggtggtgacgcaggatgtggtggtggtgtagaatgtggtgctgatggatgtggtgtgtgtgggatgctgtggtcacatgggacatggtgtatgggacgtggtggtgacatagtgtgtgttggtgataggggatggggtggtgacatgggatgtggttttggggttgcagtggtgacatgggacatggtagtgacatgggacatggtgacagggtagggtgtggtggtgatggaggtggtgtggtaatgtggcgtggaggatgcagtgtgggggacatggtgacatggcgatgtgtcatgtggtgatgggggacgtggcgtgggggatatggggtcctggatctcctgtagctctggccagtggcgagtggcaccatgcagcagggaggaaggccagcttcacgctgcaggagctcctgggcagtctgttctgggagtgaggatgtttgggggttgtggagccatcgtgctggccagttgctttgctgcgctggtggggagaggccgcctgaggtccttcgaagcagcctgggtctgtctgctccctggggtcagatgcaggccgcttctgcagcttcggcatcatgtcccagcccagccccgcagccttcacctgtaggaagattctgcaggctctctctccctccatcatctggtgactcctcaaacaccgcgccctggttggtggctgtattgattcttggtctcccagtgacgagctgaggtggggagccacgaagccacaggctgaggcagagccaggacagaccctgcttggccctgggctctggctctttgcaggcagctcagcagacagtccccgcccttcagagctcctgtgcagtgtggcttggggcaaagccaccctgtggctctctcagggcccttctgcctcctggtctgatctaaggacaagaagctttccctccggtgactgcagggacgagaggaagggatgtccaccggccgtgggcatgctcacactcacacacgctcactgcctgggtgagaggcggtggaggacccctttcccagagggaaggtctcctgtgagccacacctgaagggtgtggaggagcggctgttacctgctcgtgtggccagtgcagatcttgaatcctcagactgcaggtgaggtagccaggacatccattgtgaccttcttcctgttgacaaagacagtacatggagtggaagcttctggctatctgtgcattgcttcaccgagcacctgactgcgtctggcacgtggcgtgtgtggagcaactgcctgccacacagaagtctgaggatactgatcaaagcagaaaaggataaacattctttccttccccagttttgcctccagcatgatgcacaccccatcatatgtgtttgcctgcgtggctgtgggcaggtgtgcagtccacaagtgggtcatccacaagtgggcagcagacacatgtgcgtacagcttactctctctgccttttttgtaagctgggaaatctttctatgtgaattaatatatgctgtctatcttaatagcttcagaatattttatgatatagttaggccttaattttttaaagttgtttttctgttggaccttgaggtagtttaaagtttgcttgtgggaatgaggataaattttaaaacaggatataatgttgtctgtcatgcaaatataaaatgaataggtacttattcactttaaatacctattttaaaaatagagttttaaattgagataataaatgttgtttatttatcagggagagacccagtaagatgtagaactggttcagggaagaatccagaatgtaggcaaatagcttctcccatcagcagtactgacatgagtgtgcttcacggatgcaaggctggcactgtccacagggtcatgatccatcacatctgctggacattgtgcatttctgtggtcaagaatcatttccatcatcatcagcttttaaactcacagagttgcaacatagctcagagacaactaaaggtagagataacccaaataggtgagctaaatggaggcactctcattattgctcattttaaagtctttcacagtttttcctgatggtaattttaagaatgatgtgataggcagtgtctgtttccagctaacatggaagaagagtgtattaggccattcttgctttgctgtaaagaaatacccgagactgggtaatttatgagggaaagaggtttaattcgctcacggttcgcaggatgtgcaggaagcttagtgctggcacctgctcagcccttggaggcctcatggaattttcagtcaggcagaaggcaaagggggagtagccatgccacacagtgaaagccagagcaagagagagcgagtggggatgaagtgcacacaccttcaaatgaccagacctcatgtgaactcaagagtaagaactcacttatcaccaaggggatggcccagtccattcaggaggcatctgcccccatgatccaaacacctcccaccaggttcctcctctaacactggggacacatttcaacatgagatttggccggggacaaatatacaaactgtatcattctgccccagcccctcccagatctcatgttcttctcacatttcaaaatacaatcatcccttctcaatagtccccccaaagtcttgactcacctcagaagtcccatgtctgatgacttctctgagacaaggcatgtcctttccacctatgaacctgcaaaatcaaaaacaagttattttctcccaagatacaatggggatataggtattgggtaaacatttctgcttcaaaagggagaaataagccaaaagaaatgggctatagcccccaggcgagtttgaaacccagtagggcggctattaaatcttaaagctccaaaatcatctcctcagagtctatgtcccacactcagggcacacaggctcaaggggtgggcttctatggccttgaccagctctgcccctgtggctttgcagggttcagcccccaggactgctctcatgggttggagttgaatgcctgtggcttttccaggcacagggtacaagctgccagtggatataccattttgggatctggaggatggtggccccctgctcacagatccactatgcagtgcactgctggggactctctgtgggagctttaaccccacattttcccttgacactgcccctatagaggttctgtgagggctgcacccctgcagcaggcttttgcctgggcacctgggttttcttatacatcctgttacccaggctggagtgcaatggcatgatctcagctcactgcaacttcagtctcccaggttcaaatgattctcctgcctcagcctcctgagtagctgggattacagtcatgtaccaccacacctggctaatttttgtatttttagtagagacagggtttcaccatattggccaggcttgtcttgaactcctgacctcaagtgattcacccacctcaggtgctgggattacaggtgtgagccactgcactttgccagcattcttcactcttgcattctgtgcacctacaggcttaacacctgcatttttcaaaatggcagcctgggctgtgtctggggccctttgagctgaggctggagctggaacaacctagatgtggggagcactgacctgaagctgcacaggacagcagggtcctgggcctgacccatgaaaccattctttcctcctaggcctcaggacctgtgacaggaggagctgctgcaaaggtctctgaaatgccttcaaggcctttttgtcattgtctcgtctgttggcactcgactcctttttagttatgcaaatatctctagcaagtggttgctttacagcctttttgattttctttcctgagaaagctttttctttctttgctatgtggccaggctgcaaagttttcaaacttttgtgctctgcttcccttttaaatgtaagttccaactgtaagtcatttctttgctcccacatctgagtgtaggctgttagaagcagccaggccacatctttcttgagcactttgctgcttagaaatttcttccatcagataccctaaatcatcactctttgcttcaaatttccattgatctctagagcataaacagaatgcagccaagttctttgctaaagcatatcatgggttatgggaatattaatataatttatgccaataaacttgaaattttatatgaaagaaacttttttttttgaaaaacaaaagtatcaagaagaaataatgaactcaatagtcctatatctattcaattaaaaatttgcccattacctttccacaaaaaccctcccagcccagatggcttccctggtgaattctatatttaaacaagaaacaacagaaattctacagagcctttagaagaagactgagtcacagatgatactttttgaattattctttgatatgaacattagaaaaattcaaaccaacattccccatgaaaataaaggcaaaaattattttcaatgttgtaaatcaagggatgcaagcctggtttaacattcaagaatcaatcaacagaatttaccatgtcaactgattgaggaagaaaagccatatgatcatctcagtagatgcagaaaacgcatttgacacaattctgtaaccatttctgataaaaactcttagcaaactaggaatagaaaagagcattctcagcctgtaaagggcatctatctacagagccccacagctcatgccacacttaaactgtgatagaggaagtgcttatttacctgaagactgggaacagggcaaggctgcctgatcttacttctcccatgcagtatggtactaaaagacttagccagcacaatagggcaagaaagtgtgaacacaccatattggagacaggtctcaaccaatttagaaattttattttgccaaggttaagaatactcctgtggcacagcctcaggaggttctgatgatgttgcctaaggcgattggggcacagcttgattttatctattttagggagacatgaggcctcagtgtgtgttcatgtacattggtttgttctggaaaggtggtaccgcttgaagcaggggagggggctttcaggtcacaggtagataagagacaaagggtcatattcttttgagtctctgattagccttttactgaatacacagtttacatgtgagggggtagaggaataatcacttatgccttagtctggctcagtgaagtggtagggcagaggaagccatcagtcatgcgtttgtcccagaggagcctcagagggatgactttgagttctgtctgtcctttgtccataaggaattaccttgtgggaaaatcgtgaggggggtatgtcttttttttttttttttaaatctgtgtagctgtcttatttaggaataaaataggaggcaggtttgcctcacgcaattcctagcttaacttttcccactggcttagtgattctgtgttcccaaggtttattttcctttcacaaaaggaaacaaaagtcatacagatttgaaaggaagaaatagaactttattggtagaagacatggtggactatttagaaaaactgaaggaatccataaaactttactattactattaagtggatttatttagttttcaacatacaaggtcagtatgaaaacatcttgtttacattagctatcaataattggagacttaaaaaatatttacaatagcagtaaaatgaaatagttgggtataaattggtaaaatatgtcaatatctctgtactgaaaagtttgaaacactgatgaaagaatcagagaagatataaagaacttgagaaatataccatgttcatggattggaagactcagttacactgacatgttagaacttgagaaatataccgcgttcgtggattggaagactcagttacgctgacgtgttagaacttgagaaatataccgcgttcgtggattggaagactcagttacgctgacgtgttagaacttgagaaatataccgcgttcgtggattggaagactcagttacgctgacgtgttagaacttgagaaatataccgcgttcgtggattggaagactcagttacgctgacgtgttagaacttgagaaatataccgcgttcgtggattggaagactcagttacgctgacgtgttagaacttgagaaatataccgcgttcgtggattggaagactcagttacgctgacgtgttagaacttgagaaatataccgcgttcgtggattggaagactcagttacgctgacgtgttagaacttgagaaatataccgcgttcgtggattggaagactcagttacgctgacgtgttagaacttgagaaatataccgcgttcgtggattggaagactcagttacgctgacgtgttagaacttgagaaatataccgcgttcgtggattggaagactcagttacgctgacgtgttagaacttgagaaatataccgcgttcgtggattggaagactcagttacgctgacgtgttagaacttgagaaatataccgtccgtgttcgtggattggaagactcagttacggtgacgtgttagaacttgagaaatataccgtccgtgttcgtggattggaagactcagttacgctgacatgttaattccccactaaccaatctactgagttagtgcagttgcaaccaaaatctcagcaggattttttttttgtagaactctataagattattctaaaatatacacaggaaagcaaaagaactagaatagccagaacagttaaaaagtaaaaacatactaatgtttgggggcttatattcagatttcaagacataccataaagctgaagcaatcacaacagtgtgctctttgtaaaagcacagaaatacagatcagtggaacagaaaagagattaagaactagactcacacatacagttaggattgaccagggggtaaaggcaatttgttaaagaaaggaacagttttttttttttttcaacaaattgtgcaggaacaataggacatccatatgcaaaaagttgagaattttaatactttataccatacacaaaaattaactcaaaatggatcttagagctaaatataaatcttaaaaagtacaaaagttctagaaggaaacttaagagaaaatctttttgaccttggattaggcaaagatttcttagatgcaacagcaaaagcacaattaataaaagaaaagaattggcaaattcaaatatatcataattaggaacttctgctctttgttaagacactgtgaaaagaatgaaaagacatatcacagattggaggaaaatatttgcaaattacatatttgatgaaggacttgtatctagaatatacaaagaactctgaaaagccaataataagaaagcaaagaacccaattttaaaataactgaaaaattttactagatacttcactgaagaagagaatacaaatggcaagtaagtgcctgagatggtgctcagcttcagtagtctttcgggaaatgcagattacagcaacataatcagtacgtgcctattagactggctaaaattcaattggctgtaaaaacagtacagaaaccctgacaatactcagtgttgatgaagacgcagggccaccggaagtcctatgcctgctgctggccctgcagatccctatggccatcagggaatctgtcatttcttataaagttggacgtgtggccaccccctgacccacgcacgttgctcctgctcaccggctgacatgatggcgcctgtttgcacagaagcctgaagcaaatgttcacagctgcttcacctgtgatccccgcctctgctgcgtggttccatttctgggtcacatggaagcgggggagctgtgggcacagagatgagcggttcttacagaggcctggggtctttgaaggagtttgaagtgtgagctcgctgttttggctgtggtgccacttgcacaccggcatgcccgtgcttcacaccggcgcgccctcaccagcacacctgcacctcacaccggcacgtgcacttcccaccagcgtgtctgcacttcccaccggcgtgtctgcacttcccaccggcgtgtctgcacttccaccggcgtgtctgcacttcccactggcgtgtctgcacttggggaatgtgcatttccctttggcagctcctgtcttctgtgcggttcctcccattcccacctgtttggtgcctggcatgtaggccgtggtctctgcccgttcagcacctccatacatgctcaggactccccacctttctgttcaaacccaaacccctcctttccttccagactcttggttccagctgcctggatgccctgtggcctgccggacttagaatgtccagaggggcttctccgtcctctgctccacaccccacccccgccctggcctgccccacagtgtcaccctcctggctgacacagctccatgccgccggtgccagggcccacaccgtggcatctgcctcttctcccatgtggcatcgcacctgtcagcaggtgctgccccgccaccctcagaggctccctggcatctggcattggtcactgtccctgctgccaccctgcccacgccacagtccactctccttggttggttgcagggcctcctgctcctgcctcagttttctcacaggctgagccttggaggccccgccccttccctctctccctcccccctccccctccctccttccttccttccctccctccagctggccttgctctgccatctcaggacctcgcacaggccaccgctccctctgacggcacctctgctccctgcctgtccctgtccttccccctcacgtggctcaacccaaggctttccctactccgctcctgtcatcccaccccacacccctttctcagcaggatctttttctgtggccctgtgtctttctgaattactgtatgatttcccagcttctgagtcaatgcctgggctagggagggaggcagtcaataaatattcatgtcttggtttgaggtctcccaaaacacaccccaggcaggattccagtgaaagcagttgagctgggaggtgcaggaaaaaccagctggggagtgggtagatgagactaggaggggaggctttgggagccccttgaggcacaggggtctcagactggccggcagctggctgaggggcactgaagggcaggcccggggacatgggagcctctgctgcaggggcaaggggtgacccctggccagtcctgaggcttcctgaccaaggtcgggccctgtgactctcagttcctttctttggctgaggtcaggggcgtgccttggccctgggcattgcacggagcagggggttctggagggggaggtgccatcctgcctggcccaacttcccactcacctgaggctgcttctctgcaagggctggcaggacttctgtgtgtgtgtgtgtgtgtgtgtgtgtgtgtgtgtgtttgtgtgtgtgtgtgtacagtgtttgtaaacttgaggtagtttatacacagtaaaatatattgatctttggtgcatgtttcttcgattttgacaaatgcgcacacctgtatagtgcccgccccaacataatggggaatttccatcttcctcttccctgctgccccgcccctcgggtaccacagatccgtttttcccattccagaacgtcacacgctgagacccagggaacgtggcggcacccgcctgctttccctgtgctagtgtgttgagccagttccgtgttgtcacacactgtggctcagtgctgtcatcacgagcactggtcctggatcctgctgtgtggggcccactctgcgctccccactctccccttggtgacacctgggctatatccaggttcgcctggttaaacaaagctgccgtgcatgtggacacgcaggcttcccgggacacacgccttcattctgcctgggtccattcctcagggagactgttggctgtagggtgggtgtgtgttgaaggcttcaaggagctgcccaggtgaggtgcctggtcacgcctgcagccagtaggtgggagtcctggtcactccatgtgtctctcacagttggtgctgtcctttgcctttcggctccctgacaccgctaagtgcctcgtagcaatatacagttgtgggagctggcgtgttcaagatcgcagactgtgcaattctttctctctgttctgaagtgagattttgtgggtgtgcacaagagccctctgtcagtatccacaaggtggattctggtgttcgttttagccagcacttagattctttacagacagattgtcaaggcttgctgtggaatgcacacgttagcagtctgctgtgccctgtggacagcccgagctcacagcagtgcaggggttcctgtggcgactgtgggaggccccttgttggctccgtgtgaggccctcccagctcatgccccactgccctcgaagggtcgtgtgttctgctagagtctgtttggctgtagtttggtcctgtgcttggcactggggcggggtgggtgtcatagaccaaattgtgtccccccaagttcataggttgtgctctgaccccagtgtaatggtattgaggggggtgggccctttgggaggtgatggggtgagatgaggttatgcggtgggccccccggatgggatgggtgcccttacaagaagggacacgggatcaggctctctccacagggcgcagaggcagctctgtgagccaggaaggaccctcaccaggaaccaaaccggccggcttcttggcctcagactgacagctccagaactgggagaaatacgtgtctcgtttaggctctctggtctgtggcattttgtgatggagcctctgccgaccgagggaggggctgagggtggacaggctgggaatacctcaccttgggtgctcccaggaggcttcacggggagaccggggccgggagctgctgctggctccacacctgtcctgagagggtctgtcctggccgctgagcaggtgggtctggagggcggtggggctggcggtgctgggcgcggctcccaagatgcgtgcagctgtccgcggtggctgcctcgtccagcagcgtccctgccagaagtgggtgctttgagggccagtgcctggtctgtcccgactccctctgtgtccccagctgccagcaacgtgcagcggatgacaagtgaaatgaacgagggagtgagagccgaaaaagacaccttccaggaatcgtggtgaaagcagcgagcacagtgtggtccggggctgggggtgtgagatggctgggattatagtgagaggcgagacaggggatgcagacgggtagatgccacagggcctcctcttccccgtgaaaagcttcagactttcttcatcctcagggtaacggcagccacggacagatttgtgaggacctttggttggagtattggaaaccgggaggggtgaggccgtggagagagccgtgtgggggaggtgcccaggctggagtggcggcgtcgggtgtggagagaaactggagataagggacgcgaatctgactcggtgactttgttgttgatgttgatgtcttcactggttgccattgcccaggagggtgtttacagcacagcgctctgatcagcagctgcggatctactcttggtgaagagcaaccattagattaggctcaagtgtggaaattaaccgcaaaccagattctaaaagcagacctcctgccagtggtctggtctcctttggaagacagtgtgatccttgtctgcctgacgcagctcaggcccattcctaccagctcagtaagggccggcatggctgagagcccatcgtggaccctgggaggagactgatgggaggctcccctttctgggctgtgtaacctcaccgtgccccgcttcctcgtgagcatgcacccatggctggcaatgactgtgaggagtgacagagtgaattccaccgggccggcagcaccattcaggaagcactaactgctgtgagggcctggagccctgtgccctatggtggccgccccctctccctccagatgtgctctggtggcgggggggggggggggcgtggcgtgggggacacgtagaaggaaacatggctgtttatttcctttccggatggggaaggcttttctaaactccacatagttgaaggaatttgtagaggcaaagactgatggattcgagtaaataaaactggcaggacttttcttaggctcttagagtttaaatgtgattaaaaggcagactgggaatatatttttaaaaacaacaataggctggtttaacaatttttataaagaactcttataaatgaaagagaacatgtaaaattccaatagaaagatggtcaaaagcttctcttagaatctagcccagccccatccaatagaaatggtgtgtaaagtgcatatgtcatttcaaagtttgaagagtcacattttaaaaagcaaaaagaaataggtgaaattattttaataatatattttatttcacccagtgtatctagaatgttatcatttcaacatataatcagtatacagttattaatgagacatgttatctgtttttgtgtggccttcagaaccgggtgtgtttgaccctgagccgtggccgcacagatggcaggagcgaggggaggtggctgccaggtagtgccccttccttgcttacagctgaagcagcacctggcattcccattcttggcctctgggtgccgagggtgggtccatttggctgcctgacgtgtgtccccagcactgcagatgggtggttcctctttaagctacctggtgttatacagcagtggcctcaaacttgctcttgccctctgaccccagccctcccctcctaagagctccagaaacacagactccacgtgagggaaccccagctctgttgtagggcagtgcgctgcccgcctgctcaacttcaggtgacgaatggccccatcctctcgagccagggccctgcagctgttcagtgtcttcatgaactttcagtgactcaggaaagtggctgaagataaaaatctcatcgtacatctttgaagggagttgtgttacatttgcatgcatagcggaagattggctgtggggcgacgggagacctgaacagaaggttcttctgtgtcccctctttttctggaagtctccagtgtggctccagggttggtgctagtggctgtggaatgagtgttcacttgctgctgcgtggtttggcccttccctctgcattgtgcggacagccctgtgctgcggcagttctccacatgcattccacacgtgagcatccatgaggggtgggtatccacaagggaatggcatccacgatggccaggtggcctccggggaagctgtcctccagggaaggcatccatgagggagggtccatgagtggagggtatccatgagggaggggtgtccacaagggcagggtgtcctccaggggaagctgccctccagggaaagacaatcataaggggaaagtgtccataaggggaaggcatccaagaagggtgggcgtccttgaggggagagtgttcttgagggcaaagcgttcttgagggaacgtcatcctcgagggaaaagcatcctccaggggaaggtggcatccatgagggaaaggtgttcatggaggagggcgtcctcgaggatagggtaccctctagggaaagacatccttcagaaaggcatctatgaggggatgatgtcctccaggaaaaggcgtctatgagggaaagccatccatgaagaaaaggcgtccatgagggtaaggtgtccatgaggggaaggcgtccatgagggaaagctgtccatgaggggaagacgtccatgaggggaaggcgtccatgaggggaaggcatccttgaggggaaggcatcctccagggatatgtgtctgtgaggggagggtgtcctctagggaaaggcctccatgagggaaagacgtccttgaggggaggtgtccttgaggaaaagatgtctatgaggagatggtgtccataagggaaaggtgcccatgaggggagggtgtccttgaggggaaggcaagctctagggaaaggcatacatgaagagaggccatccttgaggaaaaggcatccatgagggaaaggctttcatgagggaaagatgtccatgaggggaagacatccatgagaggaagacgtccatgaggggaagacgtccatgaggggaagacatccatgaggggaagacatccatgaggggaagacatccatgaggggaagacatccatgaggggaaggcatcagtgaagtgaaagtgtccatgagggtggggggcgggtggggcctcggtcgcacctgccatgaccctggacttaaccttgccctgccctgtgcggtggtgggggccgggaggcggcgggggcggcgggggacgtgcttcttaaactagagctgatttgtgggagcttcgatggcccaagcccggactttgttcgggttagagccctgcgtttccacctctgcccgtggcgtctccggcagcagcttctggctccatctgcagatttgcttaagtcacttgccctatctctggggggaaggctgctgcatgtggtcagtgtggtagaacccacagtctccccaaaaaacctctaggctgtgcttgggtggggcctgctgggtcccacacccctccccatggtggcccagccccacgcagggccaaggaaaggcagctccagatcacacaggctggccaggctgcctgcggtgaggtcatggaaactcatggtgtcctgtgtgcagggcggagagaagaacaggcccctgcccacacagctgctccgtgtgccctggccggtcccatcggctgcgccttgaggaggctgtctgaccaggggcctgtgggaacctgggtctggttggtcacaaacaggcctctttctggggtcccagcacccgttgcagcccagcccagccccgaagggacctggagaggagagcccccacccagggcaagggtgggcagcggggattttaaacagggtgttttccaggcgtcgttggcaagtaactgtggcctttttctatcaagaaattcccgtgtccctctgcgcgccttatcttggcatggggcttccactggggtgctgtgcaggatgtaattcctttttaggtcactccgatactcctctttggagaacgcctgacagggcctggctgttgctatttttaacaccgagtcttggccgtgccgatggacgtggcctgggcaggcctgtgctgcctgtttcctgggaaccaggggcccttcgtgctgggccccgctccgcggcagaagcagggtgctgcttgtttggctggtgaacgtgctttttcttgccatgcctttccaagatatttttcctgggccttcctatgaagcatccagttcaaggacactataataaaacaacccatgtggttttattgactgcccttttttcctttaaggtaggagcacctgctttttcactgtagaattttggtgaagaaaatgcacagctttgggccgtgacttccccgatagttccaaggtcacgcatgccagtgtcattgtcactcagggcgtgaagtgctgagcagaagctcagactcgtgggtggagatgtgcacccccatgggggttgtgtctcttcacagccctgcctggtaacctggggacactcggtcacatctgtgctttgcagcagtgtgtttccagccaggcctgacccaagcgtgctgtccgacactgtggcgtggcctttcctgtccatcctctgcggtccagcaatatgttttgttgaagggatctttgtccaggatcgtgcaggctgcagaggctcccaggccagccctggggagctgcttggctttctgcagctgcctagagctctgtgtgtgtccctgtcctcccggatgccagggcgcctgtgtcccctgtggctgtatctctctggcacgggccaacgcctgtggtgtgagtagctgtgtctggctggtgtcacctcactctgtccagcctgtgctgagcctggatgccagcattgttgacacctcacagcgaccgtctcaggaaggcatgtgccgaagtggatcctctgagaggcaggaaccaggccccagaattcccgccaggaaggggtccagcaggagcccgtgcccggtgtgcttcctggaaagcccacacttccacccaccaccactgcaccccgcccagattgtcatgggcactgactgaattgatcaggaacttgggagccaggtgtgaaatgcagccattattaaaaatcaaattatataaacctgtaataaagtaaatatattaaaaccaaaggcaataaatgccccacactcatcccttcctaattattgtactgttacgtatgatcttgactatttagctctgtgtctgggtgagggaaatactcacacagtatttgatgtgtgaatgatggtgccttgccgagcacctctcctaccccaggttcagtgatgccacatcggtggcttagcgttggccatggcggggcattcacacctcggaagggcagtcccagggcctcgcctggagagctagtattgagagctttcgagcacaccactgcctggggagttggggggctggttctgtctcccttccccatggaggaggcctctgtccccagggcaggggctcctgggtgctggcttacttggtcaggtaaagacattgcaacaaaggtgccctgtccctggctgccttttgtggtggtgctagccacccatcagcttcagtagtgagctcccggacctcagcccctgcctggctccctttagtgggcgaggtgcttgaatcctggctgttgggagtcattgctcatcagtgaagcatttacatttacccggtacattctgcagcttcactcacttgcagaggaaatatttttttttctgttagccaaaaatgtccaatagtaggtcacgaaaacccatcctcttcaaatgagctattttgagtttctcgccttgtgcagtgactaaatctgttttaaaacgaagtctctgatgtgcgtgtctgtcggctctggtgaggccactgcaggtgcccaagcgtggagtgggttcgtactgtctgagcctgggcaccgcacctcctccagagctggcaaacagaagtgttttcaagctgaatccccaagcaggacgttggtaagaaacagagattccctcttttctccctggccttgccattatgagaccaggaaagatcacagacctcagagaaggtcatgatttttccattgttcagaggcactcactcgaaggccctgggggtggctttgcgcagctccagggctcctgccttgggtgttgctggctggagggaatgtgttttttgggtttctggttttgttcctacagagttagttaaacagtgagcacgttcagcaaacttattgtgacgatttcaagcccatataaacatggagagaatcctttccgtgcccagcacccacgctcagctgtgaagctcgtggccagttctgcttcagacccctccacctgctcttcccacccctgagcatttgaagcaaaaaccagacagtgcatcacttcattcgtgactatttcagtaggtatttcaaagaatacagaccctacacagtagctttatatctaaaaagatgatcagtaattccaacctattcaatatccagttaggatttagatgttctcagttgtctcataattgttttttacagttcatgtgttacaattaattgatgttttgatggaaattgttttgtagctttcgtgaagttaggagtgccatctcccttggcgggtgtgccccggagaggcgtgtcatctcccttggcaggtgtgccccggagaggcgtatcatctcccttggtgggtgtgccccggagaggcgtatcatctcccttggtgggtgtgccccggagaggcgtatcatctcccttggtgggtgtgccccagagaggcatgtcatctcccttgggtgtgccccggagaggcgtgtcatctcccttggtgagtgtgccacggagaggagtatgcattctgtgttctgcaggtgtcagatgtggttttctgtcgtgccaagtggaccacggagcttgactgtgtcctgcatcttgactgcttgtgtgtgttggtctagatccattgagtgccaagggagggcgctaaagtctcctacagtggttgtgggattgtctgtttctcctttgttctgtcaacctctgcccagtgtgttttttgttattagccatatacacatttgtggttgtgctgtcttcctgagagttgtctcggtcatcacgaatgttcttcttcgtctcctggagccttggtccaatgaatgttgccgccactgcggctcacggtggccctcccaggctctcggccggcagccctgcctggctcaccgcagccctcccaggctcatggctggtgtggtgtgtgctttcctgtttgctctctgtctgtttgtgtctttatcctgaaagtgtgtctcttacaggcagtgtgtccttcagtcttgttttttatccaccctgtagctcccagccttgcaattggaaagtccagaacagcctcagctgacggaacttcctgatgagagttccagtctgtggcattcacaatggcagccactggccacctgtggcttttgatggcgcatatttgaaatgtgattcgtgctgtcaaagaactcagtttttaaacatttatttcgttttcttttaaatagccacatttgacttgtgacagctagataacacagtgccagtctagaccactaaccctgttataactgttgatgtggttgaattggggtctgccattttttatttttctgtttgtacactggtttttgtacccttttcccctcattcctgctgtcttttgaattatttaattttttttggcattccatttttatttctttattggctgtttgcctttttaaagatttttttttttttttttttttttttttgagacggagtctcgctctgttgcccaggctggagtgcagtggcgcgatcttggctcactgcaaactccgcctcccgggttcatgccattctcctgcctcagcctcctgagtagctgggactacaggtgcccgccaccatgcccggctaattttttgtatttttagtagagatggggtttcactgtgttagccaggatggtctcgatctcctgacctcgtgacccgccctcctcagcctcccaaagtgctgggattacacgcatgagccattgcgcccggccctttttaaagatatttttaaagctacttgggagggtgaggtgggagggttgcttgaggccaggagtttgagaccagcctgagcaacatagcaagatccctgtctctcgaagatttaaaaaaaaaaaaaattagctgggtttggtggtgcacacctgttgtcccagcatcaggaggctggaggctaagccagaaggataactgaagcctgggaggtggagactgcagtgagctgtgatcacaccacagcacttcagcctgggtgacagagcgaaatcctatctcaaagacaaaaaaaaaaaaaaaaaaggcatattcaagtggttgctagttaatattgtactacttcatgtgcaatgttgaaatcttgaaatcacataggtttctatatggcatgtattccatctgtgtacgttgaaaatcccagttggaaatattatttcaaaaaaatgctttattggataaacaaaatgtgtgtgtgtgtgtgtgtgtgtgtattttctataccacacacatatatgcaatgtaatattcggccataaaaagaatgaaatcgtcttttgcagcaacgtggatagaacttgctttacttcttccgtgaaacagctcagaaagtcagtccacatgttctcccttctaaatgggagtgagggatgagagtcacctaagggtacagtgtgcacacgattcgagtggtggttacactgaaagccctggctttagccctgtgcaaaacagccacgtcacaaaactgcactgtaccccttacatgtatacaaatttaaaaaatgaactcagcatcagcaaactgcactccctccaccctggtttgcagcccaagccagcctgctgcacgcctttggaaatcgaggttgtggacgcacagccacccccagtcgctcctgtcccttggggctgcccttgcgctgctgagcagggaccacagagctcccatgtccatttggttatttatggaagagaaccagccctgccttcctggattcctcagaaagggctgatgggggcaaaatttcccaaatttttgtacgttgaaaactgttttgtatagttttggaatttgaaggatgctttgctggataaatcgcccttggttcaggcctcatttcactgagatgtttaggaaaggtcattctgttgtcgtcttagtgcgtatgttgggtttgaagagactggtgctggtccgattctttacattttatttttatttttatttttttctctttgagatggagcctcgctctgtcgccaggctggagtgcagtggcacaatctcagctcactgaaacttccgcctcccgggttcaagcgattctcctgcctcagcctcccaagtaggtaggactacaagcgtgcgccaccaggcccagctaatttttgcatttttagtagagacggggtttgaccatgttggccaggatggtcttgatctcctgaccttgtggttgatccgcccgctgcctcggcctcccaaagtggtgggattacaggcgtgagccacctgttgtttaattgatcttttttacctggaggccatgaggatcttatctttatctttgaaatcttggagttgattactttgggttaattttctgaagtattcagtgagcctttcagtgtataagtgcgggtctttttctgttttgaagttttcctgggttatagttttaaatgttaggtgtttcaggtgagtgtgtaagtgcgggtctttttctgttttgaagttttcctgggttatagttttaaatgttaggtgtttcgggtgtcctttgggtccctgatcctccaaatgttcctccttctctgcctgtctcccacggtcacttctttctctcacgctgttttctctgtgcgattttgctttctcagtggatttttctggttttgatgcccatgttggggtttccttccagtgactctcctggcgcctgctgtggctgtcctcctctgtcatgactgttctgtgctttgcctttgccgcccccgaggttgatgggcgctctccgtctctttctcccagtggtccattctgtgttttagtttcgcatctctgatgtgaggtggtttttcatattctcgactgcttgagtagatttgattttatctgcaatgtgggctcccgtcctgttctgcctcacggtcgttttcctcaggtcgggcacgttttcctcagtttgtgtgtgtacaattttttgtcttttttttacagccgttttgtagggacttccttttgctcatctttagtgggagtatggggtttgcaagattcctaatttaatagcaccctcttgtgttggtattgcaaagtccaagtgcattcgctggctttggaagttgggcagtgattggggtctgggagttgttcgttctctgatttgctggcgctctttctctttcaagtccctcttttcctgccttttcttcctttctcctttgccacctggtgactcagggctgctacttctctctctttttagaaatatttttctcttcttcgttggtagtgtctcagtagtgcccttgaagcatggctgtcctgctaggctgggcctcccactttccatcacagcagcctccaagtctcgccttgtgttccaacccacgctcggatgtgctgggatgctcttccagaatcttcagcctccggacttgctggctgtgtgtttgactctctgtgtgtctcttccctggtgtctcccttccctctcttgtggtgtttcttgctgtgcctttgtgcttcacaaagcctcacaccccagcgggggcagtcccggagcccgagagatcaccttctggagtctggatttttcctcattttattcactgctatttgtagctcccaattttattttatttatttatttgtttattttttgagacagaatgtcgctctgtcacccaggctggagtgcagtggcacaatctcggagcactgcagcctctgcctcttgggcttatgtgattctcctgccttagcctcccaagtagctgggatcacaggtgtatgcaaccatgcctggctaatttttgtatttttagtagagacggggtttcaccatgttggccaggctggtctcgaacttctgacctcaggtgatccacccgcctcggcctcccaaattgctgggattagaggtgtgagccattgagcctggcagcttccactttttcttcaagccacgctgaggctgcaatttgggtttttctctctatataagttacatatatatatgacatagtttatatgttacattcattatatatcacatcccctgcctacatagaaaattggggagcaaatttttgggactaggctgtcttcagctaccctggaggctcattctatgtattttaaagaacccaagaagaaaaaatataatcttttatatttacccagatgcttcccatttttcctgcctttccttattcttggagatccaagctgcccccagatcattcccctccagccctgcccagccatcagtttccagcagacctgctggtggaacatttgcttagttttcttttgtgtgaaaatgtttccctttgccttcattcctgagggatattttcaatagatactgacttctgggttgactttttttttttttttccttaagcactttaaaggccttgttccactgtcttttggcctccaggtttcctgataagaaatccgtggtaatttgaattgttgactccttcctgtatgtgtgttctgttacttctgtccagttggtttcagaagttttttctattaatacatctttgtttttcctcaatttgattatgataaaatgtggcacagatatgcctagataggaatttctttgaatttatcttgttatttgtttgaatttatcttgttatgcactcactgaggttctagaatctgtaaatgtatgtctttcactaaatttggggacattttggccgttgttttttccaagtgtttttctcatgcaccatctgtttctcctctccttctgttgctccgactacgcgtagagtagatgtgatgccattttctggaggctctgctggcttttgctgaacctttgtgctttctgttctttgatttcagtaatttctactgacttattttcagatttgccagctgttctctgtcatcttcattttaccattgagttcttctggtcatttattttagatgttgtataaatgtttttagtttttgaaatttccatttgtttctcctttatagtttctgttgaaattttctgtcttttcatttatttcaagagtatttactttgacctcatggagcatgttgtagttgttgcttgaaaaccttcctctgctgtgtccggcattggtgttgtcttagtggtggcatctgtctgtcattctttctattaaatgtgggccatgttttcagattccgataactcagggttgtgtcctggtcattgtggatgctgcgttgtatagacactggcttttcttacggttctcagcatgcacgcattcaccctgatgaggtacagaccataagctcagtctcatgctgggtgctggtcagagcccacctcactgctcagagcctctgctcgctcacgtgggttgtcacacatgtgtgtgtttggggttattggagactcaagcggcttcatacacagacttagggttccctcttcctagctcttccctccagggttgccccacaccgtccggctagcctgggtttctttctgttgctcttctggccagagagagggtggggtttcctctggatttgtagggtccacattctgctgctcccgtaagtgtggcccaggcttgggcaaagcccgaagagggaaagaataagaggctcgccctgtgtatcacttctccaggctctgactcccggcgctgcctgtctgcctctctttacctctcagcctcctcgggcacatgttttgtttgtagtgtgtggttgtcctcggcgggaacagtggcctccgagggccacatgctcccatggcaaaaccggagcccctgctgatatgcccttgtagtgccttttagttgatgcgtgtctctgtataccttcttttctctcggccgtttcctgttcttctttgcccctctttgccagcacttatctgtggaaggcatccagtgtcccccacacagtgtccgtggtcctgtggctggaggtgtcctgtggctgtgctcagcgtgctgtctcccatttcctggaatcggcctccgtcgagatccgacgtgggttcagtttttccgccgggatgctctgccatggcgttacagctttcatcgggaggcatgtactctgttcacccctctgtctgtgtctctttgtggtattagcagctgctggtgttcactgcctcgattcactgcgtcattaagaattgtaaaatggctgtattctaattctaccatttctttttcactttttggtaggagtgtttctgtaaagagggactgtgtcccctgtgcttttccagagacactgtttgtccaagaaaggcaggataacacgttgctccattccccttatttgccagttttccaaacaatgtcgggatttaaaataacaccctgatttcaagatgaccaatgcctggagactctcaggctcattatgtactcatggatataaactttcttgttgtgccgatccattctagaccataattctgtctcctagatggagtttataatatgtgaagttatatttctccatacagctaactagtccagctatccggatagatctaaccaggatgtcttccttctccttcatgaattcctcagacagtttgcctgtgcctttgtggagtgagacgaccccgtgccagagggcgattttctgagcccagtctttcagcagaagctccagggactgggtgttaactcacctgcagtctgttccagcacagcttcgcaagggccccgtgttgtaaactgtgcgtggaggtagtttgatttgtgggtgtggaggaacaatagcatcatctgctgccattcagtgccctgctcttttctatagtcgttcattgcttttcttctgaaacttctcatggtaaagatcttatcattttgataacttggttttcaaaggaagtgtggcctttcgtctgtttggggtacccatctccataacctgttgcagatgtgtgggaaccccgggcttctcctgatgcaacattctgtgtttctgaagcgtcctctcacttcagctttgagggcgtcatcacccctgtgcatggtcagggtgtggagcacaccagcagggctccccagtgtggaccagtgctggcgcatcacggttcagggctcatggtccagtgggaggggatgtggagagcagcctgtgaccacagaagaaaaggaggttcacaaagccatctgggagtccagcgggaaggggcggccttctgggaacagcctggagctcgtctgcggtctggggacagcctggagcccgtctgcggtctggggacagcctggagcccatctgcagaggaggcctggggcgtgggagtgggtggaggcgtttccagcagaggggcagcagcagagccccagcgtgcagcacttgctctgtgcagtgtccggcgggctggggacgacatctgagaagccctggtgtcctcggttcttctccacgcggttcgccggccatcctctcgcatcagggctgtgtctcactgtgcgtctggcgttccggggcccctgatgtggtggctatgccagcatagctgcagtttctccaccgccttactcctgccgtgacagcccaggaaatgctgtaaaatctagttatccgtggggtcgttggaatctgaggacacatcttttcttgtgatggcgtttgcctacagagctgtgtgcgtcgcagccccctctcctcccctgtcactccgggagcaggggtcccctctgtttgagcaggcctggcctttgttgggctttgctgaggagctcatccatgtcacgtacacttgctgttgagagaaaccaagctgtcccgctttaaattagtgggaccgtttgtcaataactgcatgaaaatatatacgtaagacttctgacccaactgtccatgtggaggggcggccgcacgtggggataaagacctgccgatgaagcgcagtggtaattttacatgtcataactcttcatcatcctgcttttctgtcacgtgcttgaaatcttgccagcttggggaaactgagagtatgtgctgttgacgtagctgagctcacgttccgtccagtacaaagcaggtgttgccaggtcgctctgtgggagatgttgactttaaatgaatgtcacggagagaggagtcattttcctcagttgtttatttaaacttagtgatttgttaaaatttagtttcaaatactattaattagcaaggtcattgggttgaccaattaagatatattgaatataggggggtttttttctcccatagaggtatggtttaatcagttagctctgctagtatatagaaggaattcaactattaaagactaagaaaggcacaaaataaacctaaacacatccaagttatcactgaatattgtactactgccactgtctttctctgggtggtacaggagttgaggcagtctagtgagaaaagtcacgggcctgaaggattttgaggccagatgtggggactcacacctgtagtcccagcactttgggaggctgaggtgggagatcactcgagcccaggagttggaggctgctgtgagctatgatcacactactgtactccagcctgggcaacagagtgagaccctgtctcaaatgaaattaaatgaaataaaattaaattaaataacctataagtgtaataaatatgttgtcttaggacgggcagcttagtgtttggattctgagacctagcaggaatggtgaagggacggggcatgagaggaagtcaaagggcataaaagcatcagcctggcccaggtctgaggatgctgtgagttactaattctgctggtgcattcgaggtgctgtgaccaaggccaggagctctggcatagaagcaaaagccagcgtcggttcctgtgcccagccctgcgccactatgcccacagcatccatcaccttgggtcctggcgccctgtgagtgaggagagtgctgacatcgcctcccactcacagggggtcgtggaggctccggagcttggtgaccccgtggtgtcctagggcgtgtagacacaggcctcttccatgccagggaggcgtggcagatctcaagcccacccactcttcccccaccctcggacaccacaacaaaaccagagttgtgcatcaagacagctggaaccagaccaccggaaacactcagaccaccggcaccaagggttgtctgttttcagaacttctgttgttttgagcacagcccaaagggacagctggcccttgggaaccacgttgggccgtctgttagggagaagtgcactgcctgggcctgaaggcagtgggctgtctggcctcctgagtgcccggggagcccacgcccacgcccaggagggaggggcccactcggtgcatccacgcagaggcggctgcgaactcaggcacggccgcccttgtctcctgctgccgctgccacctgcagcacagacggagcctgtgcacggggcctggtcagagctgtttctgtctccccagcctgagccccgtcttcacctgcagcacagacagggcctgtccgccgggcttggttggaaccatttctgtctccccagcctgagcccgtcgtcccttgctggctgcccacttgctcagctgcgccctggaccgtggccgctgggctcctgggaggtgggccatgcccacagctccacctggctcacagtgagtgccgtgtcgtcgtgagcacctccaggctcccaagcccagcacagacagcaccggccccttctctccccgcctttccgctcctccaaggaagctcgtccttttgggccctcagtggctgttgtagcaccaccaccccggcaccagacagagagccctgtcggggcttgctccttggaagcgctgcgcatcctgtgttccaggggagcggggtcaatcagtgcctcacccctcatcctgctcaagtgaaatggggctccccgactgcctcacatgtgtcccacccagggtttcctgccaggtgagatggttcgtgtcctggcctgtcaggactcccatgagtggcgaggtgtgcggtgtggggcagtggctggactgacagtgggagatagacggggacctggaaggaggggaggccatgtcgatactgcatccgctctctgaattctctgcccgcgcgtcctctcagagcctcatggtggaagccgccaggtcacacaggaagccgcactgacaaggatatttgttgcactgctctttagctgtaaaagtttgggacagattcagcacgctgcagcggtgattgcttgagtcagaatccttgctggggacctcagagacatgtcgggggcctgggagccttgatggggcgggcggggcaggggcaccagtggccgtgatgccaggctcaggttcccggctctgccacttagtggaagtggccttgcgtgagttgctgctgtgtgtcggcgtcctcccaggctgtgagcaggcggcggagtgcctggctcctacacacgtgaacacacatgcatacacaggcacatgtgtacacacacatgctccggcacacgcgtgctggtacgtgctcccgcacacgtatgcacacgtgtgcacccttgctggggttgtgcctgggtgttgctaatggctgccttcctggtgagattgtgaccagttgatcttgaggctcccagaggctctgcagtaaacacgcataacatttttttaactagaaataaggcctctagatgattgaagaggcttctgagaaatctggactcttttctatggaatttacagtaatgggaaaatgaaaagcactggaaatataaataactggaagcacaaaggcgacgtgactcctagaatctgtccagaacccatggtcgcagacatggggccccgtctctgccagaccctggtggctcccaggctgtgggggcggtggagggggtggtgccacgtgtggctctgtggacggctccgacgaccctgacagtgtgcttctctccctccaggtcgtgcacacacacaagccgcacttcatggccttgcactgtcaggagtttggagggaagaactacgaggcctccatgtcccacgtggacaagttcgtcaagtaagtctaggggcaggtgctggtgcatgtccacttcccaggggtgtggggtgccggcgggggtcttttcatggtactatgatcaccagcctcaccattcgggactcacctgggggtcatcttggctgagtctcagttttccaaagagaggagtggcccagacgtgtggccacgagcctccttggggcggcgacagaaggccacggagtgacagcctgctgcctccacacggcgagggtctgtgctctcgggccaggggacgtgagccccagataccagtggagccgtctccgtgtgtgtgtgtctgaggcctgggcctgtggtggccggggttcacatcccactgcgcagtctgtctcaaggaggtcggcagggagcgtctatcctccttgggggcgaaatctccatcgtttaggaggaaggtgccccacgtgtattcccactgtacatgccctgaggcttctgacagggccggcccaactgggtcctgcctgggaagagggggcgcccggacctggggcatccaggagtggacaggagcaggcaggggcaggcaggcttgtgttcagacatggggcctcctataggctgttgctaatagtggctgctgtattttcccgaggccgcagccgtgaagcccgccctctgtgtcccctacagtgtggccttggcacattcccatgttgggggctcgtctccacctccagaccctgggcaagccctggcttcttcacagcatgagggcttctgggaccagcccccaacatcgcagagcttcacaaagctgccacactctgtgggccgacgccgctgccacgctctgtgggccgacgccgctgccacacactgtgggccgacgctgctgccacgctctgtgggttgacgctgctgccatgctctgtgggtcgatgcagccacccggagtcgggacctgtgggcagagccgtcgagccctcccggcctggtgccagtgtgagtgtgagcgaggcttcaggcgatcccagccgctgcatccttgctgtgacataagccctccgtgttgaactcccagcgcagggtcctcgagcagagcaaagtggtttcagctgctaaaaaaaactgccacaacttcccaaaataatctgtaatttaaggcattttttttttctttttttttttttgttttgagacggagtctcgctctgttgcccaggctggagtgcagtggcgtgatctgagctcactgcaagcaccgcctcctggattcatgccattcttctgcctcagcctcccgagtagctgggactacaggtgcccaccaccacacccagctaatttttttgtgtttttttagtagagatggggtgtcaccatgttagccaggatggcctcaatctcctgaccttgtgatctgcctgccttggcttcccaaagtgctgggattacaggcatgaaccaccatgcctggccagtttaaggcagttttaatcaaaatcttagcggcatttttcctaacactcaacaaactaatactaaaattgccatataagagcaaagggtcaagaatagttaaaagaatcctgaaggaaaacaaagtgggttctcacccagctcgaccccaaggctcattccgaagaagcagtggggcaggtggcatgacgcaggcccggagaggagagcggatcgaggcaggtgcgcagcccagagagtggagagcggagtcgaggccccacccagaccctcgcggctgccttggaggagggtgggtggggacatgggctggggcacggcatcattggtgtcctgttgggaaaaatgaaattggatccctgctttgtgtcataagcagccacttctcactcaccctacataagatgaatttcagttgtattaattatataaatgtaaaaggcaacattaaaaatttcagtctaaaatataggagaaaatatagttttgggatgagagatttcttttaaaatgtgcaggaagtgcagcctacagaatggaaggctgaaaaatgtggccatgtttgaactaagcatttgcttatgaaaaggcactcaaaatgaagtcactcaaaatgaagtcactcaaaacaaaatcaaaattcagccacttcgggaaaagatatctgcagcacaccttactgacaaaaacgagtgtttaaatatatgaagaactcagtaagtcggtaagagaaggaaagcagcccctgttgggaagcaccttccagaggagagaaagtgggggtgcaccctgagcacggaggacgccgccctcacagcaggcggggacaccgcaggccggacgggaacgatgccgccgtgtttggtgtgagagcttcacagtggagtgtggcccccacggccttgtgcccccgcgatgccgtgtgtgtttccttcctccgcgctttatgcctaatgtacagcgttatgatttttgctttaaacaattttctttttaaaagattaagacgtgagagaaacgcccttggtgtggaccagttcactggctttcagtgccctccgcccttttgtgtggattctgctttttatctggcacccttctctctctgcctgaagaacgttctttaacatttattttagcacaagtcagctgctcatgaattttctcagcttttgtttatctgaaaaaggtctttgtcctcatttttgaaagctgtttttgttgtaaatagaattctagcttgtcaattttttttcctctcactactttaatgatatcgccccattgtcttctgtattgcattgttgctggcgagaatctcgccattgttctctcttaattttcttgtatataatgtgccctttcctccactgctaggttttgtctttatagctggtttgcagcaacctgattatgttgtactttgctttgatgttctttatgtttatcttgcttggggccgtttgagcatttgcagtctgtgggtttatcgttttaatcaaatttggggaaaatttgtccttgtccattatttctttaaatactatttttcttttccttcccttctcttttgttcttaggctccagttacctgatgttagattgcctggttctgccccacagggccctaaagctcttctgattgttttcagctcattttccctgtgtttcggtttggatcgcctctgttgctgtatttttaagtggctgggctcttttctgttgcagattttgatcttctcttaggtccatgcagtcagttcgttttatttctgacattgtgtttgtccactccttccagaagcctcacgtgtgctttccctgtcctcgcttttccttccgtctgtgcgttcctttcgctgtctggtcacagttgcaatgactgttcccagttgctttcagctcactccgtcatttttgcctcttccgggtctgtttctgttgacggcttcttcgtaggatgacgggacacattcacgtggtgttgctgcttctcatatcaagttattttccgtaggatggcagacattgcgaatgttacgttgtttagtgtttgagccctgttttcttcctttaaagcgtgttgaaggttgtgtttaccaacagttaagccacatggggatcagtgtgggtctgtcaaggcattctttgccttgcccttctctactggtgcagttttattttcttcaatgtggaccccccttcttcctgacacatggactggctggatcacagggtgctggtctcctctctccccactggcttgaataagcatgcgtgggtagggggatgatggactgtctctgtggaggggccaggcagacggggcctcgtcctccgttcatgggctccaggggtgtgcggtggcctcctgtgcagccatgctttgcggagatggtggtgagcttgtctccttaaggccttcctgatgataaaatgtgaccagtaggatgaacggtcggggacaatggcgtgtccagaggtcctttccctcctgtgtggttgcaaggccgtggcaactcaaccaccattctcgctgccacttctgggaggagcagatggggacagaactacctgggccctggggtgcatgtgccccaacctgtgtgtgctggtggctactgggggtccaatttctctcttaagaccaagcgtgagctatcaggagagcccccagagcttggagttgcgcttccctggcatgagaccttgggtgagttctcaatgtctccatccctgggatgcctcagaccccggcatctcacaggctgcgtggagaccagagcctgtgggagcttgagctctgcacatgctgagagctgaacgtgaggccagctcctgcggtggctgccgccattccctgccctctgcctgtcacgggtggatggtctcacggtgatgtacctatgtgctggagcccctcttataccttgtggtcatctcatgaggtgcaaggcgtctgtgtggcttttcctcaggaacctactttcttccttccagagaactattgtcgagtgatgcgatgaaagaatataacagggctcgagtctacctggatgaaaactacaaatcccaggagcacttcacggtgagtccctcccgctgcctggtgcaggggtcagacaggctggccttggcagaagccagcccttctcctgtgtaaatggagagaggtcggggtgctccctgcctgaagcctcactcacgctgccctgcctggcactcccgcagcctgcttggtggtctgctcgtggtctgagcccatggctggcctggcagggaaggtggcccagcacgcacagggtcttggggctccagaccaagcccaagagggaattggggagtgacaggtggggagaggcccagggcctcagcgtgcatgaaaataagagggagtccggggctccaggcgtgtagatgagaggttggacagcagccggtattgcttcaagagccaccgtcgccagccctgctcccatgctgggtccgtcccttcctgatccctgagtgtgcagggctggggcggtgtcctgcctcggagagaggctgttcctcagggtgagcacagggggagtgggacagagccttccacagggctgggaaagacctgtccctcctctgcggtcctctgtcaggtggacacatgagagggtggccctggtggacgtggcagccacagagatacaggcaccaggtgtctgggaaggggcaggaagctcctcagaggaggggacactctgcaggtcgtgaataacttgctgttggttcagagacccacgtcttaaatcccgtctttatgccctgggtcccccggcctggatccatctcccccgtctctggggaggccctgggtcccccggcctgggtccatctcccccgtctctggggaggccctgggtcccccggcctggatccatctcccccgtctctggggaggccctgggtcccccggcctgggtccatctcccccgtctctggggaggccctgggtcccccggcctgggtccatctcccccgtctctggggaggccctgggtcccccggcttgggtccatctcccccatctctggggaggccctgggtcccccggcctggttccatctcccccgtctctggagaggccctgcatccttctcccccatctctggccttctgtccccagcatcagcgcccactagccgtcattgcgccgtcacgtgacaggcccttgttaatctgccctctcccaggtgggcccccgtaggctgcagtgctgagggtctcgctctccagtgcccccctgccctgcaggtgggactctcattgctgtttgggttcaagggccatctcacttgtttgggcatccagtgccagttgatcaatgtccttgtccctgagatggtcacacagctgtcatgcgtggtccccaccagtagtggagtctgtacaatcccgggaatcccccgttcggtctccgaccctcgccctgtcaagcagctgcccacacacaagcggcctctcctcacgctctgtggggcacacggggaccacggggcccccactcacaccagagccaaggccctcacccctgtgctcaggatgtagctcctcctgtcagccttcctccctctcccccttggtccctcctccctctcccccttggtccctcctccctaccagcttctttctctcagctctgccatcctttccataaaatggcagcttccttgaccctctcactctcctctgccatgacccaacgtaatgtgtttcccaagtaggggcttattcagatgaaaaagaaaaacaccactgggggagcagcaaattagacattgcagaagaaaagagaaggtgactgaacttgaagacagccacaaaattaaagtgaaacagagagaaggactgaaaagtggatagaaatcactgtgaaataccaggtgtcctaacacgtgtggctgcagccccaggaggagcggggaaaggaggcagacagggtgatgcttacagatgtcatggctcagatttcttcatcagtccatgaaacttacagaaagatccaaatactgcaacaagcttcaagccgaataaacataccaacgcaggccaaggtccgattgctgaaagcaagttacatgaaggcccttccttgccacccatcatcctcggaagagtggggctctgctccccgtctctgcgtgctgccctgccatgggagcctcatctgtgccagtcgccagctacctcttcctcatggggaccatcgctcagctctttccagcttcctttagatataaagacacaggtattttaaaagtgaagggacggaggaggatgtaccttgtaaaacagtcgttagaagaaagtaggagtggctgtctgcatgtcagggtgccctcagaacgagcgtgttgtcggggctgagagcggtcatttcacgatgataaggggtcagctttttgggaggacatagcggtcgtgaacgtgcgcccctaatatcagagctcacttagacgcgaaaccgacagggctgggtggagacgggaggctctgcaccgcaggaggaccccacagtcccctcctgctggccgatgtgcaggtgggcggaggggcagtgcccgccacccgcacccttggcatctgaggctctccagccagagcagtggtggacgcagccaccgacagaaggcacccgcgtgctgggccctggccagagcaggcctctccgtctgtccgagcctggctgggatacctgagagcgaggcacacatgggctggcggaggggcagccgtcatgctgtagttctgtttccaccaaaacgtttttccacatgagggcgaaagcctcagcaaaacctccttcaggctcccgagggccgcggctgcctccacacctggctaccttcttcaggcccccgagggctgcggctgcctccacacctggctttcagggttttccaggtgggtccggagcggcctgtgcttaagggctcaggtccacccgagactctgcctggcgtgcgtatctgggcatctgcacctggctgccgggcacaggccgtgccaggcctgtacgagctctggggttgttctcccttctttccagggttcctccctggccctgggtggttccagcaaaacagtcgccagggcacatgagtctagttccagaaagaccttgcccctgcctctgagagatggaaaggatacaaacgcattctcttaccaaaaagaattaaattagaagtaaataaaaaagatatatggaaaagtctcaaatatttggaaattaacttgtttgttaataatcccaagtcaaagagaattacaaggtattttaaattatgtgaaaagctagaaccttcaaaatctgtgagatgccaaaatagtctgcacccgctgcagatcgtacggcagccttcagcgcggggagcacggcgccccccgtcaaaggaaaggtgcctctcaggggaggaagcacaggggctgggccgggcccctcccctcaagaagccgctgtgtacttggtgcctcaaagtgcccgacagtgacgtgggcctggcagcccattcttcagcacacacgcttcccaattacgtctctgagatgtctgaaaccagggtgcggggcaccagggcggctgaacaggccacccagaggcagccgtgctgtgtctgaggccccgaggctgttcctccagtcaccctcacgatgagggtttccggaaaatgggacaggataaggcttgggagtgagagtgggtctcaggcctgctctcggggaactgtggcctggcaggagctcccgtgcctctgctgccgcccttcagctcagtgggctccagccccggcttccctgcctgggcacggacctgatctctcccacagccacggccctgagtgaggctttaggccaggtggatggtggagggcagccttgcctggcaggtaggagggtccaggatgccccagatgcccagttagctcatgccaagctggtgccaggcgggcctgtcctccctgtcttgtcactgagactgggctggcagacctcggaacgctgccccctgggccaccactggctgcctcagtggcctggtctttgctgggggccctcggggtgtctgtgtggcggggcctgacttccccggggtcctgggcagagctgggcagcagcggccagccagacaatcaccctcctgccccagccaggtgccctctggctgtcagagggaggaaaatttaatttttacaagattgatggtattggagcaatatttttagctgagtctggttcaaataataggccattaattgaaaaaggaaattgaaatgaatttatcttgtacataaatgctgtcacgggtattaatagggatcagaaaatagtggcctgttcccagaaggcgattgaacctgaagctgcgcctggcgcgtgagcctgtgggggggacgcggctgaggggctttgagcgacctgcaggtgcccattgccaccaggagatggcgcccacgcagcgcctgagagtttcctaccggagatgatcagaaggcaacttttaatgcttaaaaaatgaggatattaggctgggcgcggtggctcacgccggtaatcccagcactttgggaggctgagtctgggatggacatgcaccgactccgccaggcgaggtgggcctggctcagggcagaaggccccaggaggtgcccaggctgagccccgagctctgcgcccgcatggaaaatggaaaagtggcgagagccaggctggaagacacctgagtgccaggcggtctgtgtgcctcatccctgaagcgcctttgtcagagcccttgctcctgggttcagcctggtgtccctacccctgggaacacatgtccacccacagcactggagacagggctcagagctagccccgccgtggaggtctcggtaccacgttggtacccagagaaatttcttagccaccgcggtgcatcctcccacacaggcctcgacactgaagaagtgcctgggcgaggctttcccgggctgccaagtgcctattgatccacagctccaacagcacagaaatcccgtgtcttgtctgccgggcacgcagggagctccgagaacacatcagtcagcgcccagagagccgacgtcggccagaggacgcagggtaacggctttcctgaactccgcttccaagagggttctgtgaggaagaggttgcaaattcattttcgtttaacgtcacccgcatctggtttcaccacagaagtggagccctgcagtgggaggggtggggggcctgtcactgggctttgctgctgatttggcctacctgggaagcccagaagatgtatttactgtagggacttgaggcttgcttggggcctggtaggagccaaggccaccccatcctcccagctcagcttggtgacttaccatccatggctctggttcgcttgtcacccgcccctcccagagaggctgcgtggggctgcaggcgcctgagtgtaggtcccagcctgtgtcctgggctctagtcccattgaagccttgtggctggctgggcatgggtcccatgcagactggtggggccaggagggcctggcgtgggcacctgcagcagcttcttcaaggcctcccagcactgaccgtggcctctcaaagcttcggctgcttcagcagctttcctgctgggagctgtgagcactgctggggcccatgcccaggactgtcctgaccggactgaaagccctagagggaagctggcagtggggacagggtgcaagaggaaagaccctctctccatgcagctccttcatccacccacctggaggaactcctagagggaaggtggcagtggggtcagggtgtgagaaggaaagccccactctcctcttcatccacccacccagaagaagtttgaagaaaccatgccttttaatggcttaaagttggagcagaagggtttatctgctgatacaattaagatagcttcgggagagggctgagaaggtgtggcctggcggacacactgcctccagggacacccctgcccccgccagctgtgcctgctcagagagtgcctgctcctcggagggtcccccctgcttgggaaggtacctgctgcacaggaccccagctggagtcaaggagtcagcagaagagggggttggaggagcggctggggacaggaggtggctgtgcgggctgccccacctcgcctcttgcctgagcccctctgtggccacatagacagaaggaggggttggaggtgcagccagccagctgggccaggtgagccggtcctgaagggcaccaagcagggttgccccgggctcctgagaggatttttcacatgcagcagctggagacagtttggaggggcccagggcggtgcagacccttccacagctgctcaggtggcccggaggcgtgtgcacccttccctatgcagcagggctccacaggcctgggcactcagcccagatggtgcatgtggggaaccgtgggaccccatgtgccaggagtctctgggcagacagcagcgacagggctgtgtggggacttgggcaggcctgagcctggggtccgatgacctagttgggtctggggcagccacaagccgaggcgttgaggaagagagagtgaagtctgagctccttgtgtaggagacctccgtgtggagtagccccagaggcaggaggctgcctcagccaggatggccccatgcacttgctaagctgcgccgcctgctcactcaaggctcttgggctcggagcagaactatgagcctgcaaggcctgctgggcagagtggccacagcacgtggccgctggtcaccaaccgggggcttacccctctcccacccgctagcgctgcctttgcacctcggagggcaggtctctgctggcaccatgagtgacctgcaagcactgccatggtggactctgctcgcgccttggtggcttctaggcttttccaggggctctggcctcctgcagagcagggtctgcctcccccgcggctgggtctgtggagagtgaagtggggcacagatgccctttgcaagtgctgtgcacggcagctcacagcccccacccccagctctgtagtctgtaagaggcaggctctcggcatggcccccaggcagtggccctggtgctcttggggtggggggccccagtacccagcggtggcccaggaatgagaggcccgctgcttcctgggagaggcccttctgctttccctcctcctcctctgtgagctcccccttccactctcgttctcctaaataagactttagggagaatttatggaaaattgatggagtttacggatgttctttgatccagagaaggggaaggaaaggcaaacgcgtttatgatgaggaagctcatctgccttagggctccagccctgccctggggctcgctgcctcctcacctgcctgggggcaagacagtcctgatgaagtgagagggggcgagattggttttctgagggcaccgggcccttcatgctcccctaaatcacgggctgtctcctcagcgggcaggtaatgacctgctccccggccccagcacctgcagtcccgtgggacgcgatgatgtgcggctggggctgcagtgaaggtgaaactgtcatatcgatctttttagcactaaaatatgagccactttactccgctccccgctgctgtgatgtgaaaaataataactcggatccaaattaaaaatattgatctctggaaggtgttgaaagtaaataaacaccttccgaagtttttgggtcagccgagaaatggtattcagcaataaatgtgtcagagtccagggttcttgatctgttttttctttgaattgatttttcattatttacttcctaaaagtgttggaatttggtcctccactgtgaaatcccagtgtttgggcacattatttctttggggcttatgaggtgctcctaatccactcccttattgatggattgatgtttgactccataagcctgctttatttaggaccttccatcataattttttgtacatttaggcttgactcttttatttccttctaacagatgagctgacattgggctatcaaacgggtgggaaaacaattgccatgaggttaatttcatggtcggctccgtgcgttctgagcagacgggtgtttcctggctgcaggccgggccttggatgcagccttgacgcgtgtcgatctgtttacacacagggctgagtccgccggccccccgggggtgctcatgggtgcccgggtgtctgcaagctgcccgcagctgggtggtctctgggcacggatgctctaggccctctgggctccaaggaggctgggttgtatgtctcttgagaagctttcctttcgaaaggccaccaagaccaccgagactgctgagaccgccaaagccaccaagaccgccgagactgccaagaccaccaaggccgccggctgctcccggtggctccatgcacccggcaggagagtggaaggcgtcgggcctggggcagtttgaaaagataggtgccgccagcatctgcgcttcctcgtgggtgctcaacaggctgcctgggaagctccttctgccatcacctggagtcagctgccgtccacagtggaagctgccagccaccaaggctaccgacctgggccctggggatgagcagcccaggaggcgaagatgcctaggtgggtccccagctctgcaggtgccactccccacgccagtgttctccaaacttccggggagacctgtctgtgctcctgtaggtgtcaggcagactcagaggcacaggggttcagattgaggcctggggctgaggaagcaggaagtcctgtcaggagctggagcactgagaaaggcaccttgctgagagcagccttggaagggtccagaactggaaagatggagagctgccattggcccgtagctctggggctggtcctggccatctagccatgggaccatgggcagagggttccctagctctgggtgaggcgggagtggtgggcagtgctggccatgaggtccctgtggggtgcatccacggacgcgggtctggaggcgctgctgtctaagctgaggcttttgaaggatgaccgtgcccaggttatccagtgttccttctcagcgagcagctcccatggcagtccattcattcaacatgccctggtccagctgctgcacagccatgggtattctgtgctgagcgccgtggctgatgcacacccaccgtcccctgcagaggagacctctgcacgcaggcccacagcaagggccggatcaggagaacaacccacttggcaggcggcaaccttgcctggcactcaccagggcctcctccccagcactgtcccgagtcaggtctgcacggcttcatggctgcctgccctgggaggtggagcatggagaaggccagtgcctcatcacagagccagatgcccacaacaggatccagtgctgtcagctgggctccagaaacctgaggacatgcagcctgcagctcctgacacatgacatgtgacatacaacacatgacacgcggcatactccctgtgacatggcacatgacacgtgacacaacacattctcatgctccgccgacgcgtgacccacggcacgttcccgcgctccgccgacgcgtggcccacggcacgttctgacgtctgccaatgcgtgacacacggcacattataatgatgtaaatattgattattgatttaagtgaaaatattgagagggtgggggtgagagatggagtgtgtgtgtgatattgagtgacggggaaagatagtagaaagtagttaaatcctcttcttccagcatggaaaaattgaaaaatcaatgttgaaaactggaaaatcaagaagtggcaatataagctttagaggtatggagataaataccaaaagaaaacaatcaaaagaaaataattgcctctgggaactagaagactgaagtggacaggagctactgttttcatagtgtgccttgcagaactcgtgtgtgtgtgtgttactagcttttaaaaaacaaaattccaggaaacttcttaggaggaagagactccttctgttgatggtgacatcaaacaagacctgcaggaggaggtagcactgacaagaaggtggtgtgccagtttgtgatctggtgcggtgaggcacctgtgtcagcaacaggtgggagtggctctggtgtctgagcagaggctctggtgtctgagcagaggctgtctggatgccattcacggtgagagaagagcctagaatcttgactgtcctttgagtatcaggtaaagaaatttgaatgtgattaggtagtcagtggggaccattacagagttcagggagagaggtgaggcagtcagaactgggggaagatggagaagggacaagtgtgttgtttcaaacgtagagtcctctgatatctaccttttaaattcttattgaagtaaatgcacagagaggaccagaagtggtgatccatattggtgcacatttatttttttgactctgattcctttaagcctaaaactagggcagtgtcccatactgagcactaaagagaagtagggtcaaacccaggagggaggaaaaccagatccctgcaccttggccaagatgaggatgccggatggagcatagccagtcctggaatgaggcctgcatctctcccttgcacaatgcccccacccacaatccagccaggtctctctgtgtccccagctgcatgctcccacctcttcgtgatatggtttcaaaaacacaatccagcaccatgtgtaaattgtttgatgcttgagatcaactttactgaattgcctacattgaaagtgatgaggacaatacctccttcaggaagaaaaaggcaaaatgaagtgctttcatgaatagtcagaagggtcttactaacataaaaatattttgattatgtcttcagaatctctttatgtagttagtggcttgtaagctgtcaacttgtaaatgatgccgttggaaattgaaatgtaaataacattaccatttataatagcatcaaaaatatgaaatatttaggaataaattaggtcaagatgtgtaagacctgtatactgagaactatgatatattgctcagagaaattaaataagatctaaataaatggagagatatactatgttcatggatcagaagactcaatcttgttaagatgtcatttctccccaaattgatgtaaagattcagtgcattactaatcaaaatctgagcagacttttttttttggtagaaattaagctggttctaaaatgtatatgtaaatgtaaaggaattagaatgggccaaaacaactttgaacatgaataaagatggagtccttatactacctgattaagacttctttgaatctcaataattaaatcagtatagtattggcataaaaccagataaacagatcacagaacattatggagagtctagaaagtggcccactattgatctttgtcagaggtatcagtggacttcagcagtgagtgaatgatcttttccacaaagggtgctgtagcaattagagggccgtttgcaaaaaactcacttcaattgttacttgaaaccacatgaaaatttagcttgaactggatcatagacctagcgtaagagctagaaccatgcagcttccacaagatcacacaggacttctttctttaaatatgacaccaaaagcagaaaccactataagaggaaaccagtcagttggacctatgaagacgaccgtggcaagcgctggggaggcggtggtagcactgcagccgtcgtgttagtgctggaaatgtaaaacatgcgaaaacatggaggtcttaaaaaaaacgttgaaaatacacacaccgtatcacccagccgtttccctcttcagtatttacttaagagaaatgaaagcacattccacactaagactgaatgttcatagcagctttattcagaatagccaaaacctgtcaacagcccagatagccacagcaggtgagtgggaacaggaggggacagtctgtgtacaccgtggtgtgtcagctgtcgcagtaattatggtgggcaaaagaatccagaccaaaccaaaaatgcattctgtatgatttcatgtatatcatattcttaaaaatgcaaacaagtctgtaatgacagaacacagatagtggtttcccggggaaggggttgtggtgggggctggagggattccagtgagcactaaggagaagccaggtcaagcccaggaggggagcacggtagatccccgcaccttggccgaggtgaggatgctggacggaaggcagctgtcccttccacactgcccaccccacccgcactccagcctggccgctctctgctcccaccctttcatgctgtagtttagcaaacacaatccagagccaagtgtaaattgtgtcaaggggcgaagggacccagggaaccttctggagcgacgggcatgttagtctcctaattgtggtgatggtttcacgtgtggatgtgtcaggactcatccagttacacgtcacatgggtgcaattctgtcagtgccacttacacgtaccttagcactctagaaggaaaatctagtcttgtggtggatggcttgtgaggggtcaaactgcagatttaatggaaaagggaagtacttccatcagcagctggcccctcgaacggactgtgcacaccactgtgtgtctcacaactcaggcaactcggcacgccgcaggacataacggcagagtgtgagtaattttccattttatatacacatatgcgtatgttatataaaattgaaaagactttcttctcgttaaatcttattttattttgacacaggatgtcactctgttgcccaggctggagtgcagtagtgcaatcgtggcttactgcagccttgaactcctgagctcaagtgatcctgtggcctcagcctcccaagtagctgaggatacaggtgtgcatcaccacgcctggctaaaaaaaaactgtttatagagactgggtgtcaccgtgttgcccagtcaggtctccaactcctggcctcaagtgatcctcttgccttggcctctcaaagtgctgggattacaggtgcgaaccactgtgccctgccaaaaagacatttttaaggttaagtaaggctttgttgattttgaatgtaacattattcccactcaatgagtgattttggtcgacgttcacctgtactttctctgcactctgagccggcaggtgccacttctagcttctggctggggttggtttgcagtggagtctgtgcctgtggcagccgtctgcatgactttgggtcattgcgctttccttgccttttggggagggtccctggtgctctgtgagcagattcgcccctaggggtgaagtcatctcgctcctcttctgagccgtgagctgggcagggccgcgctcacatcattcctctccccctgtcgccgggtgggaaatccgtaacaggctctgtggcaaaggctgggccaaggtgcctcgtgggcagccgatccatcaggcggccgacaggcgtgatcgagtgccgtgtcacacgcagcccaggaaacaaacacgccgcgcgaaaggtattggtgaacgaactgaaaaattgtaaagctcttaaggactttcatgcttgttagcattttttgacagaaaatcactgaagcagtgaacataaagaaatagccatggttgattcacagtttagcttgttgttctgttcatttggcctcaggtgatgtttcacttccggagccccgtgagctgctccttgctctgcctggctttctttcctgtgcaaattcttgcgggtccctcagctgtgctcacccaaccacagcctccctggagatgggtttttatgattttgaaggagaccgaaggaaactgaatgaacaaatattttctccaaagcccgtccaggtttggcttcagatgctgtgagccgtgtgtacatttctaggcttaatccacagaatgaatgtgagcttttatgtcacagcctgcccaggaccctgctgtgtgcctggagggcacctgacctgctcttgaggcttcactacctgatgtcccaaagggaacatcgtgtttttcagtgtgttcctgagcagatgggtgtctacacagacctcgcctgttgccctgtgcgtttgtgtgatgagttggggtgtggcacaccgctgtgtgggggtggctgggcctctgagtgcgctctctcacagccacgtctgctggggcccacagctccccatcagcagcagcccagagctgagcacagaagtgtgggtgattttcatgagtgcaccttgccatttggcttggcacctgttagaactgctatgtgctctttgaaaaccacccatccttctgtcccaaggaaggtgacaagcacgatgttttcctgggagaaagtggctcccatcctggccacacatccctgtcagggcagcgtttagtgcatcccacctgtgcacgtagagatgcatcctgctgtcttaagtatcggagtccccgatgtaggcttgttggggtggctcaggttttcccgttgcaactgaggcgttgagcagtcaggggctgcccctgcctgcccagaactttcctgaagtcgtggcctggcagcgccccgcctgtgcagggcaggtccctcaaggccaagccctgttgtgcatgagggcacccccagactgaaggaaacgaagctggagcttcagagatcatgcccacctgaggccttccctcgcctttgcagacacacctgtgtttccaaagaagggggacagacggagcacttcacttccatcccgagagtgtctcccagacagcgcaccccgcagcggccactggctgacccgtggccttgagaacacaggaaagccccctcttagattcacagaaacgcccttcctaggagtaaacggatcctgtgtttttcccctcgattctgtgtcgctaattgttaattatgacaaaggaaaagtgatattaagattcggggtatttgtttcattgtgtaatttcttccttggttaaaagggaagaatgggctgggtgtagtgcttcacacctgtaatcccagcactctgggaggctgaggcaggtgaattgcttgagcttaggagtaatcccagcactctgggaggctgaggcaggtgaattgcttgagcttaggagtaatcccagcactctgggaggctgaggcaggtgaattgcttgagcttaggagtaatcccagcactctgggaggctgaggcaggtgaattgcttgagtttaggagtaatcccagcactctgggaggctgaggcagatgaattgcttgagcttaggagtaatcccagcactctgggaggctgaggcaggtgaattgcttgagcttaggagtaatcccagcactctgggaggctgaggcaggtgaattgcttgagcttaggagttcaagaccagcctggccaacatggggaaaccccatctctactgaaaatacaaaaattagccagctgcaatggcgtgcacctgtagtcgcagctacttgggaggctgaggctggaggatcgtgtgagcctgggaggtggaggtagcagtgagccaagatcacaccactgcactgcagcctgggcaacagagcaagatcctgtctcaaaaaaaaaaaaaaaagagaagaatgatataaccacattagtcctttaccaggtttgccttaaaactgagtcactgtgtgcctggcctttactcagcgcttcctcccatgtcgtgactgttataatgcatcattacttcctcactatgattcatctaggaacttgggggagtaattcatagtcagggatatttatgtttaaaccgacagaaagggagagccatttgaacacattattccatgttttcactggttttaaatctgatttctgctggctgggggaaacttgaggaactgtgaagtcatcgtaggcagtagggaggtaacggataagggcctttcaagcatgcagtgaagagacaccagctgtacagctccctcctgtatggaaaaggtggaatttagacagttaaagtattaaagtatacatcactgggtttgaaaacagccacaaaaaaacccctgtcggatcacccaaaaccgctggccccgtggcgcaccatcccgaggctgccgactttgcagtggggctctctttccttctggagtgcagcagcatctggaattgtctgggaaaaccctgaaggatggcccacaccgagccgaaacatctttcaaacggaaattgttacactgtgctcttcatcttgaaattaatgtttggttgtcaatttttattgctgacctaatggatgaagtccagcaattgcagctgtccccttaaagcggcccccagcgtgtgctgtgcagaccttctcggcaggctacccacccacctcatccgtaagtggactcgggtagagaaagatatctgtgcattgagagctcgttggagataacttgagtcataatgtgtactgagtgtgctgggaatcataggagggtaaaggtggtttttaaaaaagttattttcattaattcctctcacccccaaccccctctgccacctgggacaaaaaaatggcagggtcctgctggatgccgctttccaagctggggcagacccgccagtgttgagcaagagggaggtttcatctgaggctggctgagttttatatatctatttatgagatccaataatgtaatgatgtgcttgtctaataaatgctgctgtacaagctcaggacagcagacgtttccagtatgacctggattgtctaagccgcagccccttttggttggagctcggctgtttaataaatgtcggctgttcttccaaccatcataattatttaaaggggcttcaaaagagagagaacaaatcaaatcaagccattactgttgaagctcgttctggagttaagtgtgtttttaaaactgtgggccttgtgcagaggctcctcccagttttcatctattatcacaataattgagtttgtagctggaattaaatttatcaaattgcgttatcctctttagaaattggataggcatgctggcagggcgaggcagaagttaatctgctttgctgaagcctccagtggccctgcacagcggggctgaagaggcccagacagcttcctgtcaccccggacacgatgtaatttctcctcaatcccttgtgcaaataatgacatttgaatcgagcattaacaggcttaattactttaaaattgtcattttaatttacactgatatagtattgatcatacaagcagagattaagctgttcagtggagcagatgatggggaattaaacattaaagggtcctcagggggccgtgtgcgctgcccggcgcgagccggaagagggatgatatttctcggtaatgaactggcggcatgcggggacatgaatcttgggctcttggaaaaggggaaataatggggtttgggaggcatttgcaggttattcattcgccgccatgcaccaattctccagtgattcatccgcctcaccaacatttatttatccagcaaattccggagctttgacctttttgctaagtacattgaacataagttggagtggagatctttcaagtgtaacttttacaagtatttgttatttttccttatttctaggcaacattaaacaaagttattcagttttttgagtgtactggagtctgccggccttgcagggttggtgtggtggtgagggactaatgggctcctgcagcccagccccacacttgacttttgaaaattccagtggcagatcccaggctcaggtgtcactgatcctttcttaggtgaaatgacacgagagcctcacgttcctgccatgggctgatggcctcggcctcctttcagttgaggctttctgttggtggttagggggcaaagtgacgccctgtaacttattgatgctgccatggaaaaaatatggaaatgaagcagaacatgagtttctcagaagcacatttgacggacttcttttggcgaaaatcagagcacttcaaatcctgtaacctcaaactgtttcacttttcagaggttatataataaaaagttaagtgattgattttatagttcagtagggagtgatgaaattcttgatcactatccataatggctttattttaaacagtgggctagagatttaattaaagcatgatcagggaaatgaaaaaatgttgatatttctcctcaaattaaacatgaatttgcacagggagcattagaagggcttatcattcctcctgatgtttttattctcttccgtaggatttaaaagcttgcggcccacttcacccctctctgaatagctcagggggcttcagcccctgttgaccgtgctctgggtttggtccatttctgtggctttctttaaaaactgccgagctccatcgcacgaccaccactgctggcgtttattgagcgtgtactgcttgtgaggctttgttctgggggatcatttccccactttatctttggggtgccggagacacaggaaggttaagaaacagccggtgaggccgggcatggtggctcactcctgtaatcccagcattttgggaggccgaggtgggtgggtcacgaggtcaggagatagagaccattctgccaacatggtgaaaccccgtctctactaaaaatacaaaaaattagccaggcgtggtggtgggcgcctgtagtcccagctactcgggaggctgaggcaggagaatggcgtgaacccaggaggcggagcttgcagtgagcagacatcgtgccaccgcactccagccttggagacagagtgagactccatctcaaaataaacaaacaaacagccggtgagtagcaccagcttgtgtgaagctgggaagtagccccgtgagcgccaggtgttgccgggccaggccttccctgtgaggcgggttccctggtgcccactgtggcctactctgaggggcacaatgcaggctcctattcttaacctcaaggctttctatgtagcacgtcctcacgggaccacagaacgagagggagctgggggtgtggtggaggagtggcaagtgacagggcagaaacagctgctcgaggaggccccgtgttctcctgggggaccgtcggtgacatttcagcctggcttagctgcgtccttgaaagtggttctgcttctcttacgtgcttgcagacaccattcatgtgtccttagtctgacagtgacttggtcaagcttggaggatgtggggcctgcctgtgcgtgccccatgggcagagagggcgggcgcggttcgtgctggactctagatgtgcagctccaagtgagatgtgggtagatgccattgggattttggcgtgagcgtggacctgggtttctggaagggcattgttcccgtgtccctgtccccactgtggccttgctgagcccccagggagccaggacccgctggtgactgctccctctctgtcctcagggtgcagccctgcacagcccttctagccctctcaggtctttcttttgtccaaactcttatcttctcttgggtccccagggtcaccaacctctttgcagaaaatccctctgcagccactgaccccacacccccagcccccatgccctcactgcacacgttctcagcccccatgtcctcagcttccaatccctaaaccccacgtcctgaaacccacaccctcagcctccacccccaagaccctacaccctctgactgcgcactcccagaacctgcacctgaccccacaccccctgaccccacccccccgaccccacaccccctgaccctacaccccctgaccccacaccccctgaccccacacccctgaccccacatcctctgcatactcccagaacccacacctgaccccacaccccagaccctacatcctctgtgcactcccagaacctgcacctgaccccacccccccgacctcacaccccctgaccctacatcctctgagtgcgcactcccagaacccgcacctgacccccacaccccctgacaccaccccacagcccccatcttcagcctctcctctgctgtagtccccagcccctggctggcttgcttctcagcacagccctggcccagaagcaggaggacactgtcagcccctccttgctggggggagagtggttggggcacacctgtcccctgcccctctgctgcccacagcacagctaagtcttcaccctgcctgcgcgcatccctgtggccttctgggaggtcccagtggggagcctgtcttctccccagaacacccagtctccctttgtgccgggtcacccctgtgagcaaacaggcaggcatttccctcttagggaagaagcctcccttgaccccgtatctccccagctccttgtcctatagaaactgatttcttggcagtgtctttctttcttttttttttttttttttttttaaggaaaatgatggatattcatgtggtcaggacagcggtgccaaagtggagaaactgcaaacggcggtgacggcttgacgggcgtcacttttccttggtctttgtcagtcaggtctaatttataacagggccattagtgggagatagctttctttggatgtcttttcccgtaagggttgctcatggtttggcctcagtaaagaaaagagaaggtctctctttcatattgttggaagcagcaggtggcccactccttctggagtgaggcatgggcatgtgggcacgcctccatctgtcaggagtgtccctgtctctcccttctgattgggacagtgggtcacactggtggccagtgggcaactggggcccctggagccgtggcctcccctgggcccaagggaggcacagatgacttaggagtggagagttcaaacgtgggctgcggcgaggcttgtgccctccctgcttcggactccgccctccctgcttcggactccgccctccctgcttcggactccgccctccctgctctggactccgccctccctgcttcggactccgccctccctgcttcggactcggccctccctgctctggactccgccctccctgcttctgactccaccctttctgcttcggtatctacctccttgctttggaaggacacaaccttcttggctggcacagcccttcctgccatgcctgttgatcccatcatcagccaaggatgtgttggggccgtattctgcggctcctccagcatgggaaggtgctgacaggaagcagcaccaacacctcctggaatagccgttggcacatgagcttcctgatactgtttcatgtgccttacatgtgccacccatgcagggatcagagcagccctatgaagtgggtactgttatttgtcttccccgtgtcacagatagagatgttgaggcacagagaggttcagggaccaaccagaagaggccaatgtgggatttgaacttggttctggcctcagagcctgtactctcaaccagcctgctctgctctcagaaggggacagcgcaggaaaggccagcttcagccagggtgacggtgggggtggtgctcagggtggacagcattgattagaggtgactgttgtccaatattcagctaaactgtaggttttaaagcttgaggacaggtttcgttagaggtcaaaattcagtagttcctttcccaaggatgtagggagagaactacgttttgttaagtggctcttattgagcattgtgacattcttttgctaaaaacatgtttgtgcatgtatacacttgtactaagaaaatatcttcattttatttccttttcctttatcatgtgacataagatttattcacttcatatcagcatttaagtattgtcaactttatgaaataatatttgggttggcgattggttttgaaatgtgaggacaggagatctgggaggggtcgggatggaataatatggtttggctgcgtccccacccaaatctcatcttgaattcccacatgttatgggagggaccctgcgggaggcaaggggatcatgggggcaggtctttcccatggtgttctcatggtggtgggtgggtctcatgagatctgatggttttacaaagaggagtttccctgcacaagctctttctttgcctgcttccatccatataagatgtgacttgctcctccttgccttctgccatgattgtgaggccttaccagccatgtggaactgtaagtccatattaaacctctttcttttgtaaattcctcagtctcgggtatgtatttatcagcagtgtgaaaacaaactaatacaaggtctttcctaagtttggaaaaacgtgatttctcatctcttcaaaaacgacttccactccccctctgcattccctctaggttccagttacatgtgcgttggaccccacgccttccacgccccaccccactcccctggtattgatgactgccttcttctactgtccattctgtattccctttgccttcagcatcacctcagcgggtcgtggtttttttcctggtggaatgtcccaaaccttcattcctgaggggtctgggtcacttgtagtcttgcctggattgggctgttgtagtttcccgttgaccttaatcacaaggcatggtaatactatgggacgccctaatggatctcctgtattccatgtatactcttccttagcttcgttgcagagtagtagactgatttcaccttgatagaccagatcaatcaccccaacagtgtaactcctttcttagcctattgacataaaggtaggaggagcccagagtatccaggtgacaatcttaacttccagttcagtgggattgctgtttggtctcgcggtggcagcattcttccctctggaactaataacgctaggccagcagaacgtaatgttgcaggaacaggaagcaaaacttttgctagtggatcattaggggtgatggtgagtggtgccacttccacttccacccttgattcccggacccgtgaatcctggctatgggagaaacagtatcatatattggacgctgattcagagcatccatggccctctggagaactttgtcccagccctgcaaagtattgccacctagttggtgttgtaattgtgacttcaaaaggccattccaccattctgtcaacccagctgcttcaggatgatggggaacatggtaagaccagtgaattccatgagcatgagccccctgccacacttctttagccataaagtgagtgccttggtcagaggcaatgctgtgtggaacaccatgatggtggacaaggcattctgtgagtccatggatggtagtcttcacagaagcattgcatgcaggataggcaaacccatatctaaagtaagtgtctattccagtgaggacaaacctctgcccttcccatgatggaagaggtccaatataatcaacctgccaccaggtagctggctgaccactccaaggaatggtgccatatcaaggactcagtgttggtctctgctgctggcaaattgggcactcagcagtggccgtagccagatcagccttggtgagcggaagctcatgttgccgagcccatgggtaccctccattcctgccatcatggccactttgttcatgggcctattggacaatgacaggggtggcttgggaaagaggctgaatggtatccacagaaggggtcatcctgtccacttgattatttaaatgctcctctgctgaggtcacccattggtgagcactcacatgcgatacaaatatcttcacaaattttgaccactcagagaggtctgtccacatacctcttccccagatttctttgtcacaattttccaatcatgcttcttccaagtccctgaccatccagccaaaccattggctacggcccatgaatcagtatataatcacacatctggccatttctccttccaagcagagtgcacaagcgggtgcactgcttgaagttctgcccactgggaagatttcccttcaccgctgtccttcaggaatgtcctagaaaggggctgtcatgctacagctgtccactttcgggtggtgcctgcataccgtgcagaaccatctgtgaaccaggccccggtcttctcttcctctgtcagctgatcatagggaacttcccatgaggccatcggtgcaggctgggggagagaagggagggtggcgggagtggagaccatgggcatttgagccacgtcgtcatgtaacttacttgtgccttcaggacttaatcaagcccaatcacatacatgccacttccatttgatgatggaatgctgctgtgcatgacccacttcatggctagatgggtcagaaagcacccagttcatgacatgcagttcaggtcacacggtgacttgatgacccatagacaaacgttcagtttccaccaaagcccagtaacaggccaagagctgtctctcaaaaggagagtagttacctgcagaagatggcagggcctcactccaaaatcctagaggcctccgctgtgattcacctatggggacctgccaaaggctccaaacagcatccttatctgccactgacacctcaagcaccattggatctgctgggtcatatggcccaagtgtcagagcagctggcacagcagcctggacctgttgcagagcctactcctcttctggaccccctcagtcctccatacccaaagtccagaaagttgggaatcccagtgaatccctagcagcatcaaaaaaataaaaactcatacccagtcagattataacaaatcaagaaaaccatagagagcataggggtgtgccgcagtcacactgacaggccaccttcctgttcctgcagaaatggtaaccgcaggggacggtgcagccgcatcttccgtgtccttggaggaaatgtcagcatagggtcttacccggcaaaacatctcctaagattgaaggtgaaatagacattttaactcaaatgaaaaacagtaagtactaacggatgttcttcaagcggagagaaaatgatctcatatgaagtcagagaggagaaaggaatgagactcaaggcagttgggggaagcgggcaaatggccatgggcattggttgtgtaaaccgaggcacctcctgcagtgtaaaacacggagagaagtgcggttgagcatgggggtgggtgcgtgtggagtgagcgttccaggggccttgccgtgcccgggagagtgagggtaacggacattcccacggggatattcccacgcggagaactgggaccccgatcagggtctggagggagcgtgtgcccttggaatactgctgttttagcatttctggggaccgggaactaaggtaaattatttgaaacagaagtagatggcaatttcctaatataatggacatttaaaactcaattaaggcttttgagtagagttttatatgccctgagcttttgtactggcagaaggtattttgtaaacagcttgtgttcagtgttggccatctcttaaagtgcattttactttaattattctatatccataatgcacataaccagtttctccagaacatgtatacatgaaatgtaattgaaaagctaatgatttttagaagacaaaagataagagtcagaaccattttaattaggatgcaaactccttacataatttaattggcataaaagtttattgatttacttgtataatcatttatacgtagaaaaatataacaaatttcataattaaaactagttattttaagactgatatttttctttgttcattattgaaattttcaatttgtgaaatatttattattcaaaaaatagcatctgcgttgcaaatgaatctcattttgagaggaagagctctaggtgatacaggtttaaaatgactggtaggcacccacagggaaactaggttcctcacacagcctcgtttttcatgagacctgcggaaaggctctggggcgtcacgtctccctgtggccgaggctgctgttgtctggcacaccgtgagttctgggccaggacctttccacctgtctccctccactccgggtgaaagaggcatggggaatttacttgcttttcctttttgtctggcatcagctcgtgaaatatattacatcagacaaaagtcaatagagatttcccttttgaaaagcaaggtccatgataatgggctgaacacaagcaggtgactgtgtgggacagggctgcccaaaccgccgctggcctacagactgctgtcccggccagtgctccgctccctgcgcccctgatgagatggcagccctgggcacctgtggctgctccctcctcctgactctgctccaaggtgccacctgcccaaggttccgtcctagtccctgaccggcccctcctgtttcccccgtggctccttgccccactgactgctggctctcacctgctcctgtctctccacagtagtagcctcagtccagtgcttgaccctgcccttttctctggctccagctcctccttggcaagctgagtcttccccagctttgaggcccatccacatggtgacccccaccgtcacccaggcatctgtcctcaactgcagacccacaggtattcacatggtgacccccaccgtcacccaggcacctgtcctgaactgtagacccacaggtattcacatggtgacccccaccatcacccaggcacctgtcctgaactgtagacccacaggtattcacatggtgacccccaccatcacccaggcacctgtcctgaactgtagacctaggttcagtcacctttgatgcctccctgaggtgtctgaagctgtttcagcctctgcaggtccatggctggacgctgtctctccagagcccatcccagctcacattggtcttggaggtcctgtggatgctgcctgggtgcagagctgaacctccccactggggctcctctgtcatggcccccctcaccacgctgccgtcttgggctctggccatctggtcactcatgtatctcacatgtctgagaacatatgtggcacagaggaaggagaaagtgccgggtgcatatttgtggaatgtgagtggtgactgaattctctcagcaagggtgggtgtccttagaccggccaatgactttgcccccgcagtgtgacagagagcccagtgctggtagcaggcgagaagccaggactgctggtcaccttgccgccctcagatgtaccccctttggagaagcctgccgcaggctgttttacaggccatctcgttccatttcagttgctcctcaccgtggtaatcggaaatgttaacgggcgcactcgtctggtggaatttatcgtggccagcgagggcgattaagcggctggtatgtggcgtgtttaccctcgtgtcagcatgactggtgttccaccctggcagatgaaggcccggtccttcctgggctcctaattggggacactacatccaagagccgtgacagggttcagcaacccgcgtgcagaatgccggcttccacggggcacgctttataaaatgctctttaattcaggaacagaatatcattagctttgtaaagtggatgaatacaatggacaaccaatttaattaacctctagcgtcagctgtcgaacaggaggcagaatgagattacgtgtgcatctctcccgccagcagccagccgggagaggggctcggcaggaggccagacagggggacaccttggtgccgtcatcccgtttggccccaggagctgaaattggaaagtcagtgctttgtaaataagtcagctgtcattttgtggtggtcacggagctcctctgagagcggacggtcacagccccccgtatgctgcctgggggtggcactgggggaagtgggcagtagtgaggacgccgccttgtccagttgggtcagccgcccatgagttcattatacaggaaaagatcaatgaagcgctacattgatttaaacaaaagctttgtttcatttattattgtttataatctaatgactgttattataactttgctttgatttattactcaatctgttaaattgtttcaaaacaaggtgtcttgggacttgcctttgtgatagggttaaatgtgtgacttttgcaagtgtgttcagcttctcgggagcaccgtgaacctgtgccttgggttgtgctttgagacctgagctgagggttctgtccagcggtcctgagctgctgctgctcagccgggcgcccagagggtgtggtgcctctctcattgcccaggagccgtggaattcctgcctgccgtgacctgggcattgtggtggaggactcagaggcgcccaggccacatgcctgccctcagggggcttcccttccctgaaagaatttagatgaggaaaccagtgagtgctggaatatgcagcaccttgaaggaaaggctggggactgggactgccaagcctctgcccagagtagccaatcaagagggctgcttggaggaggctgcatttccacagagacctgaagcagcagggggtccatgtgagaagctggaaaaggggaggcagcagaggtaccctcctgacagaagggcgcagcctcctcaggcccagatggccaatggggctggagctctgtcagctgggtgtgtgagggccagaggacagctggggtggccactgtgcaggacgtggctgggaggaagtgcagtggcaggcccagaggtgcatgtggaaaaggccaccttggtgcccggtggagaagagaccaagggggctacagctgtggaggaggcgggggccccacagggagatgagggaggtgggtgtgcagcagtgcagagacgtggaaggctagagatggacagggttctgtaatccgtagaacctgtggaaggaagggatgtttgggtgaggcatatggacaagatgctggaggaatctggagagatccgtggtttccagtgggagctggaggagggtgagggtggagtaggtctccagtcctgaaaggtcggacttgtcacgggagacccaagtggagactgtgcagccgccgggccaggaggctggcctttaggaggctccatgctgtacacacaagagctgcccgctggaagatgggacagacgggccaccccagcgggaggaggaggtggaggagaagggctcgtagggtaccctgagcagatccagagtgctgttattcccaagtaggaggaggagatccagggaaggagaatgtggagtcccgtagcctagaagtaacagagtttggaggagggtggagggcgtgagaaggtgatgagacaaataaataattctggattatatttaaaaattaaaaatctacaaaatgagacaggaaaatgggcaaaggatacaaagagttcacagaagaaacttaaattgccaataatcttaaaaagagatgcgccagacacacagaccatggagcagaggggacagccaggaggcaccctgcctgggcagccaggtggtctctgacaagggtgcaagagcattccatgggagaggacagcctccagccagtggtgctgggacgctgatacccacacgcagaagaatgaagttggcccctcacattacattgtgtacaaagttaacccaaaatgagtcaaagacctaaaactataaaacttttagaagaaaacatgggccagaaccttcacaacattggatttggcgatgatttctcagacgcagcaccaaaggcacaggcagcaaaagaaaaaagagacaaattggactgcattaaaacacaaccactttgtacagccaaagacaacatcaacagagtaaaaaggcaaccgtggaatgggagaaaatatttgcaaatcaaaaatctgataaggaattactatccagaatatatagagaactccgaaaactcaacaacagcaacaacaaaaaccaacctgagtcagaaaggggtttgaataggcgtcttccctccaaggacggcgtggagacggccgataagtacacgaaaaagcgcccagctccacgaacctttagggagatgcagatccaaactgccattttcatttgtcagtttaaaaggacttgcaaaataccttatacccattaggatggctgttgtcaaaaagcgcagaagatagtgagaggtgacagcgtgctggcagtcctcacagccctcgctcgctctcggcgcctgctctgcctgggctcccactttggcggcactggaggagcccttcagcccaccgctgcactgtgggagcccctttctgggctggccaaggccagagccgactccctcagtttgtagggaggtgtggagggagaggcgctagcgggaaccggggctgcgcgtggcgcttgcgggccagctggatttccgggtgggcgtgggcttggcgggccccgcactccgagcagccggccggccctgtgcaatgaggggcttagcacccgggccagcagctgcggagggtgtactgggtcccccagcagtgcccacccaccggcgctgcactcaatttctcgctgggccttagctgccttcccgaggggcagggctcgggacctgcagcccgccatgcctgagcctcccacccgctccgtgggctcctgtgcggccggagcctccccgacgagctccgccccctgctccagggcgcccagtcccatcgaccacccaagggcttgaggagtgcgggcgcacagcgcgggactggcaggcagctccacctgcagccccagtgcgggatccaccgtgtgaagccagctgggctcctgagtctggtggggacgtgcagaacctttgtatctagctcagggattgtaaacgcaccaatcagcgccctgtcaaaacagaccactcggctctaccaatcagcaggacgtgggtggggccagataagagactaaaagcaagctgcccgagccagcagtggcaacccactcgggtccccttccacactgtggaagctttgttctttcgctctttgcaataaatcttgctactgctcactctctggatccacactgcctttatgagctgtaacactcaccgcgaagatctgcagcttcactcctgagccagcgagaccacgaacccaccagaaggaagaaactccgaacacatctgaacatcagaaggaacaaaccccggacacgccgcctttaagaactgtaacactcaccgcgagggtccgcggcttcattcttgaagtcagtgagaccaagaacccaccaattccggacacaatagcaggtgctgataacgatgggagggagttggaacctttgtgcacgtgggtagaaatataacagggggcagccactgtgaacattgaggtgattattcaaaaagttaaaaatagaattcccgtctgattcagcagtcccacttctgggtacagaccccaaagaattgagagcagtctccagcagatatttgcacacctataatcaaagcagtattattcacaactgcaaaatgcggaagcagtaccatggaatatgacccaaccgtaaaaaggaaagaaattctggcaagcactacaacatggtggaggaacttggaggacattatgccaagtcaagcctgtcacagaaacacgaacatggtatgattccacttacatgaggtactcggattagtcaaagtcatggagacagaaagtacagtgcctggttgccaggggctggggagagcgggaagggaagagcgggaaggggagagcgggaagggagctgctgctggacaggaacagtttcagctgggaaggtggacagcgtcctggaggtgggaaggtggacagcgtcctggaggtgggaaggtggacagcgtcctggagatgggaaggtggacagcgtcctggagatgggaaggtggacagcgtcctggagatggatgttgtgatgggagctgttgctggtcgggaacagtctcagctgggaaggtggacagtgtcctggagatggatggtgtgacgggtgcagacgttcgttaggcgcggactgcgtgccactgacctgctcacctgaaggtgggtacgatggtcaagtttatgctgtgtgcattttaccacagccacacagttcgatgaagaggtgcccaactatgctagtataatgaagatgcaaattaaaacaataaggtctaatttcacacctatccagttggcaaaaactagaggctggcactgggccatggcaaggatgtggaacgtgggcactgccctgatgagaccactgggggatcgtcatggcaacaggaggggcaacgtggtggtgcctgggagggcatgtgtctgtggtgacccagcaaggccatctgtgtattatatacatatgcacgcatgtttaatcagcgtgtaaactgtgtgttatcctatgtggaaggcacgtgtctgccatgacccagcaatgctgtgtattatatacatatgcactcatgtttaatctacgtgtacacgtgtgtgatcctatgtggaggacacatgtctgccgtgacccagtaaggccatctgtgtattatatacatatgcacgcacgtttaatctgtgtgtacacatgtgtgtgatcctatgtggcgggcacgtgtctgccatgacccagcaatgctgtgtattatatacatatgtacgcacatttaatccacgtgtacacgtgtgtgttatcctatgtggagggcacgtctcctgtgacccagcaaggccatctgtgtattatatacatatgtacgcacatttaatccacgtgcacacgtgtgtgttatcctatgtggagggcacgtgtctgccgtgacccagcaaggccatgtgttgtattatatacatatgtatgcacgtttaatccacgtgtacacgtattatcctatgtggagggcacgtgtctgccgtgacccagcaaggccatgtgttgtattatatacatatgcacacacgtttaatccacgtgcacacgtgtgtgttatcctatgtggagggcacgtgtctgccgtgacccagcaaggccatctgtgtattatatacatatgcacacacgtttaatctgcgtgtacacatgtgtattatcctatgtggagggcacgtgtctgcggtgacacagcaaggctgttatatatatatgcacgcatgtttaattcacgtgtacatgtgtgtattaccctatgtggagggtgcgtgtctgcagtgacccagcaaatcctcctgcatagtatgtctgtgtgaacactcagtacccatgtacctggatgcttgttatctctgacacacttgctcagtaacaccatgcagggaagattattatagcatcaattacaatactcaaataattggaagtagtctttatgtgcaacagagaaatggataaattacagggttttttgtttgtttgtttgagacaaagtctcacttgctctgtcgcccaggctggagtgcagtggcgcgatcttggctcactgcgacctctgcctcccaggttcaagtgattctcctgcctcagcctcccaagtagctgggattacaagcatgggccaccacacctggctaattgttgtatttttagtagagatggggtttcgccatgttggccaggctggtctcgaactcctgacctcaagtggtcgacccaccttggcctcccaaagtgttaagattataggtgtgagccactgtgcctggccaaattacagtatttttatatggtgaattattatgtagcattcaaaataagctaaaatatgtctttatcttggtatcacgccataggacatttgagaaactgtcctctttcttggcttcctttgtgaaatccacctgtgtttctggatgtaactctgatctgtgtattttccttgctgtatctggttctatcataggaatatttcaaatttgatttacccatttgcacgttaagcatttgggtcattttcagttggtgttttcagaggtcatatgccattgtattctcatgcctgtctcctgagagctccagcgtctctgagagaggtctgtgtgtgcattccacgtgtgtatacagacatatgtatgtctacaggtgtatgcatgtatgtgtgtgtattacatatgtatgtttgtctatagtgtatatggatgtgggttatgtacatgtgtgtgcatggatgtgtacatatgtgtgtgtgtgcaggagtttctcttgggtgcaaagcagccgtgagggtgtggggttgtaagttcacaggatgtggtgtgtccctgtggctcatgtcttcagcagtcactcattagtcactgtgagcctgtcttctcatttctcctgtattacaagggcagaggaaatgtctgaaagatcaggctcagaaccacatgcctgcctcagctcgggcaggtgctttcaccctaatgaggacggaacgtcaggcttggcctctccgtgatgtccttagctttgttctcagagagcacagatgtttgccactggccctcacagggtgtgtcagagcccaggtgagcatggtttcgtgcccctgggctcctgcgtgaggccgcgtccttcatttgggggtcctgtgtcctcacagcatgcagctggggaaggagtgggctgcgtatgaggggagtcatgtttagtaatctctcgactctcatttaaaacaaatgaagttctctattttgttgcagacttgaagattagttaccaacaatatcttatgaagtttttctttctgctcctagatttattttattaaaaaaaaaaactggaggtgaaaacgctttatctgtagaaataacaaaatgtcatgctgtctcagagtgagatgggagtcaccaaatgctgccactcttttttctgagtcactgttgataagcacggtcggccttagtcagggctcccctgggccgcgggccgtggcctcctccctcaacactttttcccttcccagtggcagaatgcagtggcaggctccacagagatccccctggggcgcactgggagctggcacctgtggtcacgcccgcgacgcggttggaaccagcacaggggaagggccctgttgccacctggggcctcacatgggcactgcttgtgcatttcccctttctgtctcgagcagagtgtgtgctcatgtgcgtcccttagcgcggggtctgtgtgactgaagttttaggaatgtgttctgttttgtgcacgagggagctgggtgcagaagaccaggttaatgatgtgtgctttggtcgttcacctgattgcggaaatgataaattaccggccatctgacttgtttgcaaataaaaagtgatggaggcatttccaatggcagctttgtgttcctggcttgtcagcctctgccccggcctgagtcatcccgagccttccagccggtggctccgtccgggaggtgggaccctgctcaacaaacacgggctttgtgattgcacagtgcctgccgggacgcgttgttctttccaaatgtgtgagaagtggtctgctcccgccctgagttggctgtgtttgcaaagtgggcccgctatcagaattcagctcccgaaatcaagctaagtgacacggtgtggccatttatcacattaccggactccaattgaagttgagaggttgttttaatagcatttgtaaatactccatcttcactagccgcccctgtgagaggcactgagcccccatggtacgcagggttcgttgcgccctggtcgccagttggtgtggaagcctgatggtggtgactgggagcttcagttgcccattagctcccaggctgccttcagagaccagggtcccaccagtgcagccccagccagggcccaggttagccggggtctggatctcctgtgtggcccgcaccggatcgacttttcggtgccccaggggcttggctttgtccagtggaggccgcttcccggctgtgccgtggcctccgggggctggaggactcctgcccgtgtctgcagtcctcgcagaagcatcacagctaatggctgcatttcactaatgcagaattaatgagcactcttgacagtcttgtttatcaatacgtaaaaagtattttgtttttagcaagaggcgaggagtcattattctcagatgtgacagacatactcttgacaagtactgtggtcagagacctgggcgagctggggacttcctgtcggcaggccccggacacgctcctggcccaatgtcctggtgtctgtgataaatgggtgccctgaaccgtattgatgggacagggtaaacaccgaaaaagttgggtcgaactttgactttaaatgttcattacagctaattatggattttctgactatgaattgcagtttctatccctgcactggcaatttatttttcacttatttattgcaaactttataatattctgttagctttaacattcaatgaggtaatgatttaaatgtttgcagcgacatttattatgttttttcagagtgctttctttatctgaaacaaatgaagggatatcttctataaagaagggctgatgttggtggaggagacattaagtttcatccatggggcataggcctgcagttttctctcttaactctgtgctgaaactctattttgccaaagaaaaggatgaacactggctttttaattttaattttctatttttttgagacggagtctcgccctgtcacctaggctggagtgcagtggcatgatctcagctcactgcaacctctgcctcccaggttcaagcaattctcctgcctcagcctcccaagtagctgggattacaggctcatgccaccacgcctggctgatttttgtacttttagtaaagacggggtttcaccatgttggccaggccggtcttgaactcctgacctcgagtgatccgctgcctcgcccccacaaagtgctggtattacaggcgtgagccaccaagcctggccaacactgggtgtttttaagacctgctgtaaaggtggctcagttccccgggttctgagcaggttcacagcagatgcctagtgagatagcgggtcagtcgagcagtgtccatgtcacagccgagtgcatcatggccacacgcagccttctggacccagcagcagctcaccagggcatgtggcctggggccagggaccacagagggcctgaggacacagccccatgtcaggcacacaggttctcccaccttctggctttcccgtggaggcagagatgctgcctgctgcaccctagacccacctgcgagagaagaggaagtgcactgcgtccccctcgggtatccttcatctccgtcccctagacagaaggtccctgtcatctagcctgggggctcccatctgggtggtggccaggatgcagggctgggaggcccatggttaccctgcagctttgggttctcccaccgaggtctggcactcatgagtgtgcatgtgtgtgtgcacatgcaagcgagcactcgcacctgccacctgtgctgggtggaggcggcacgtgtccctgctcctgcctgtgggtgtgttcccttccccaccagacgcagcagagacaggaggcagaggccaccatggcgtcggtgcacaggactcaggcttgccagccggcctctctttttaggagtttaaatgcactccttgaagtgtgttctgtcagagggcagctgtgtcatccccaaggtgaaacactgttttctggtgaggtgtccatgtggccagcgtccccgggagcaggaccatcaccccagcccaccatgcactgcacacgccctaggagcaggagctgcacagcctccagggagcttcccatgttgtggagtcggcatcaaaccagagacggcctaacaggccccagagagctgacccaggggcccagggggctgcagacagggaccaggccagagttactggcacgattggccctcagcaggcccagaacataagtcccctcaccatgcactgtgcctgccgccctgcgcctctgagggagcagcagcctcctgacgccccagtgtggtgcaccttcttgcagccctgcccccaggacagccaccccagtgaccggtcgtcagggagggagcagcagttccctgggaactgcagagcctgaagtgtgtgggacgtttagcttgggccatggaattaggtgatgttcaggcattgcctttgactttcttagagagacaatagctctgcagccccgtagggcagcatctcagcaggaggtccacactggggcactcagaactgcagggttgtggggtcatggttctgcccaaaacaaagcaagagtgcatgagtgcgtgtgtgcaagtgtgtgagtgtgagcaagtgcgtgcgtgtgcatgagtgtgtgtgcaagtgagtgtgaacaagtgtgtgcgtgtgcatgagtgcatgtgtgtgcaagtgtgaacaagtgcattgtgtgcatgaatgtgtgcaagtgtgtgagcaagtgcatgtgagtgcacgaatgagttcgtgtgtgagcaagtgcgtgtgtgcaccagtgtgagtgcatgactgagtgcaagtgtaagtgtgcgtgagtgcgtgtgtgcatgagttagtgcatgagtgtatgagtgcaagtgggagagcaagcacgtgagtgtgcatgagtgcatgtgtgcatgttagtgcctgtgagcaaatgcatgttgtgtgtgcatgagtgtatgtgtgcaagtgtgtgtgagtgcctgtgagtgcttgtgcgtgagtgcatatatgtgttaatgtttgcaagcgtgtggtgtgcatgtgtgtacatgaatgtgcaagagtgtacaagtgaagccttggaatgaggtgatactcaggcgttgcccttgtgttgcccacaggctcacacagacacagtgagggatgcaccacgccctgtgctttcagctgaggacaggccctgttcagaatgcagagttggggttagagcccccagtggctcagagtctcttccctgtggaaggccctgtgtgacctggtaacggttgggctccctgcaggcagcccctgccctccgtctgcagctgcgcccgtgtgccctcctctctggcccacctggcaccgccgcttcaaactctcccctgctttatcccaggacctgctacccccacagggcacacagctatctcctatgagataggtttgtttgttaagtcaggtttataacgattaatgtatagatggtgagattcgccctctttggggtataatttagtgagttttgacaaaggcaaccactgcaaaccagtgtagaatattctgatcaccccagagttgcaccaggccccgtgttggggttgccagatttagcaaaagaaaaaaatacacagaaataatacacatgtcagtacgaacacactgctgcatgtagacacaggttcatctgtagaaaataccacgtgaaacttgcagttcagatcaacaagtaactgtctgtgtggtatccgtcgacccagccctgtggcgtccagccgcgtacttttgccttctctggtatgaagagcagggatccctgtgctctgcaaccatccggctaatttgtaagtgggagacactggcagctcctggggcgatggggcagggtggggccaggcgcagtggagctgatggttggaggccccaggacgaagccgagcatcagtgctgggaagggtctggtccactcaatgcccggccggtgggacctgcgcccctgctggagccagcaccggctgcacggctcacctgggaagggtctggtccactcaatgcccagcccgcgggacctgcgcccctgctggagccagcaccggctgcacggctcacctgggaagggtctggtccactcaatgcctggcccgtgggacttgcgtccctgctggagccagcagcggctgcacggctcaccgcatgcctggagcttggtggagtttgggtgtttgcaggttacctctgcctgacatcctgtgcctcagtaactgtgattaaattataactggtgaaactcttgctctagctagtttaaaagagcttcttttattgttaaaaatgatctttagaaatattcccagcaccagtctctcatttgatttctctttttgctctacaggcactaggaagcttttattttcttcatgagtccttaaaaaacatctaccagtttgactttaaaggtaagactgcgtgccgtcttccgggattttgtctcggcactcacccctcctggtgtctggcttccccagacctctcctgccctgtctctgtgagtggccactgtgggctgggtgtcttgagccactgtccagaggtcactccaggggcctcctggacctggactcgaggccccttggctgtcccacactggctccctggcaaggctctggtggggacctggctttcctagagttgagttaagaggaaggaatagtttgtatctgtgttcccatccagtgtgagaaaatgaaaagccgaatgagagggttgcatgtttcagaaataagaacaggcagggacggtcctccctgccgtgaacagcatccccgtttgatggtcatgtgctgtgtgtcttcacggaaaagacttgccctgagacgctccgctgacacaagctgtcccctcctgttcatttctttgtcgggggcaggtgcgtgagctaggccgggtgtggggcttccgtgcgtgctccacacggcctgggggtgtttgtgcgatgacttcccgtctgacgctatcgtttcctgctgtgtgtgagttctcagaaccccacgcggcctccggagcagatgacatccatgtgaagtgccctgcacgtcgtagtaactgtggagccacaaacgatgtcgtttcgttcggattccgtgtttgtgctccctcgggagacggagcggctcctgtgaaattgcgcggtagtcttatctcagttgcttgagtggtgatttcattgatgacgagagcaagattctggccagcaaaatgatttgtcactgccccgttacctgaagaccttcagatccttccaaattatagcatccaagcccttctatgaggcccgtggcaggatcagccgcacagaattgcaggagccggccggtggcgctctccgctccgttttggagacacggcgtctgcgtgctgtgcgctcaggcacggagcggccggcgagagtggagagagcgcgccgacgcagcgtgtgctgcaggaagctggagccaaggagctggtgcgtcaggctgcgccgtgccgcggatctgcagaccttttgtgtttttcagtagccatttgaatacctgttttactactaagttaaatcagtcataaagtgcctggtgaacctacagtgtatttaaaactatacatgagatacacacttcactctagcaaaactttccccagagccctccatgtggccaaactaacaagaacaacatgaggagtgggcagcgagcatgtcctgagcacgtggtgcgtcaggaaggcatgcagacacaggaggcgtgtggacgcgggagacgtgtggacatgggagacgtgcggtcgcgggagacgtgtggtcgcgggagacgtgcggtcgcgggagacgtgtggtcgcgggagacgtgtggtcgcgggagacatgcggtcgcgggagacgtgtggtcgcggggtgtgcggtcgcgggaggcgtgcggtcctggcaggcgtgcggtcccgggaggcatgcggatgctgacgatattctcagtgccccacacggcaggtgttgctgctgatgctcagcgcagtcggggggcctcgggctgggcggttgggctcgagggtcaggctcgggggtcaggctaggggctcgaggctctgagaaggactcaaaaagaaaacctagaaatcagaaacagtaccagaaatgaagcagtggctcatgtgcacacgcggctgagggaagaatcagcgagctggaaggtgttagaaacttcacaaactgaaaagcaagaagaaatgagaataaatttgaaaacagaagaaaatggccaagacctgtgaaacagcgacaacaggtgcagcttgtaaagggaaccccagtaggagtagaaggaaaggaacagaaggaagatttaatgtagtaatggtttagaactttccaaacttgtaactgacaccaaaccacagatccagaaagctcaacgaatgccaacaccaagcaggataaatgccagaaagtcaaccccaggccaccttgtattcaaactgcagaaaatcaaagaaaaaagagaagatcttgaaagaatccaggagattccttataggcgaggtgattccttatctgtaaaggaacaaggataacaattacattggaccttttcccaggaaccatgcaagaaggaagagagtagtgtgaaacatttaaagcattataagaagaagaatatcatattcagaaaaagattattcttcaaaagtgaaggaaattgactttgtcagataagcaaaaattgaagtaatttgttgccagtagacctgccttgcaagaaatgctaaaagaagctcttcaacggaaggaaatatcatatagcccagaaactctggtttacctaaagaaagaaaaagcattagagagggaataagtgaaggtaaaatgaaatatatttttcttacccttaattggtctagcagataacttttgctcaacgtaacaacagcaaccatgtattggttaactgcagcttatggataagtggaatgaataacagaaaagtcataaggacaggagggaggaatttggggtactctgttataagaaacctgtactatcgttttaaggaatatagtattatttaaaagtggacatggattagttatacattatattgcaaactatggcaaccactaaaaagctttttaaaagaagtataattgatgtgttaagagaggagagataatggaatcatataaaatgcccagtaaaagccagagaaggcagataaagaatgggagaccccaaagatacaaagaacaaaggcaacaaatagaaaacttacaaatatggtaaatattactccaactatatcaacgatccctttaaatgtgaatggtctaaatataccaattaaaggacagagactgtcagagtggattaaaaaaaatacccaactatatgttgtcttctagaaacccatttatataaacacctaaagattaatagataagggatggaggaaggtatagtgttctaacatgaatcaaaggaaaacttaaatgggccaaaagaaagctggaggagctatattaatttatagcatcaaatacatatattagaaaagcagaaagatctgaaatcaattatctaagcttgtaccttaggaaactagaagaaaagtaaattaaaccaaaagctggttgtttgaaaaaaacaataaaatggataaacctctagccagactaagaaaaaaaatgacacaaattattcatgtcagaaattatcagaataggcagagcagacttcagagctaggaaagttttcagcagtaaagagggacattacatcatgatgaaaagatcagatctccaagaatacataacaatccttagtatctagctgcctaacaacagagtgtcaaatacacaaggcaaaccaagtagagctgccaagagaaacagatgaacccactatcatagttagagacttcaacaccctgtatcaggaatgaacagatctggcaagcataaaatcaggaaagacatagtttaactcaacagcaccatcaaacaaattgatctaattgacacttataggatacctcatccagtaacagcagaatctacgtttttgtcaagctcgcctggaacattcactgagacatcacattctgggccataaaacacacctttacaaatttaaaagaacagaaaccatatacagcatgctcatagattacaatggaattaaaccagaaatcagcaccagaaaagtagctggaaaatccccaaatacttgaacattaaacaacacatatctaaataacatatgagtcaaagaagtctcaagagaaatttaaaaatattttgaaccaaatgaaaacgtaaatacagcttaacattcatgggatattagcaaaagtaatgtttagaggtaaatttatagcatcaaatgcatataagaaagagctaaaaagaaaaaagtgctaagaagaaaggaagaaagagctaaaatcaattatctaagcttctaccttaggaagctaggagaagaaaagaaaattccaaagtaagcagaagaaaagaaataatgaaaattggaacagaaagcaacagaattgaaaacaggaaatgaatagagaaaattagcaaaaccaaaagctgattctttaaagcgatcaataaaatcgataaacctctagccagactaagaaaaagagagagaagacacagattattaatatcagaaattagagaggggccattactgccgatcctgtggacatttaaaggataataaaagaatatcattaatttctgcctataaatgtaataacttagatgggccaattccttgaaagacacaatctatgaaaactcataaaaggaaaactagagaatctgaacaggtctatagctattaacaacactgaataagtaattaataacctgctgaaaaagaaagcatcagaccaaatggtttcactggtgaattctatcaagcatttaaggaagacgttataccagttctctacaatcttttccagaaaatataagcagaggacaaacgtcctaaatcattctatgaggccagcattaccctaatactaaaaccagataaagacattacaaagaaggaaaactatgaactgtaaacaaaaatgctcaacaaaattctcaagagtcagttatatactatgaccaaccgagatttactcctggtatagaggctggttcagcatttaaaaatcaattaatgtaatccatcacagcagcaggcaaaagaaggaaaatcacatgatcataggatagatgcagaaaaagcatttcccaaaatccacatctcttcattgtttgaaaaaaaactcccagcaaactaggaatagaggggaagttcctcaacctgataaagaagagctccaaaaatcctacaatgaataccacacttaatgagaaattagatgcttttcctatgagatcaggaacaaggcaaggatgcctcctctcctacttctcttcaacatcttactgaaaatcttagataatgtaataagacaagaaaaggaaataaaagccatgttgatggggtgatgggagatagaactatttctgttctcagatgatatgattatgtcaagaatctcaaagagtcagcaacaataacagacaaacctggtaccagtaagcaattatagcaacattgcaggatgcctagttaagatacagaaatcaattgctttcctgtgtagcagcaatgaacaggtggaattttaaattaaaaacataataccatttgcttaagcacacaccaaaaggaagtacttaggaataaatctaacaaattaatacaagatctctgtgaggaaaactataaaactctgatgaaataaggaagatctagataaatggagagagatttcatcttcatggatagttctatggttggaaagtaggtgccccccacccccaaattcatctgctgacctcctaacccctaaggtgatggtgttaagaggcggggccttgggaggctgattagaatgtgaggtcagagccctcacgaatgggatcggagccctcatgaaagaggctgggagttcatttgccccttccatgcatgaggacacacacaaggcactatctgtgaggaacctcatctcctagcaccctgatcttggacttcccatccctccaaactaggagaaagacacttactttgtttacaaaccacccagtctattttgctatagctgcccagtggactaaggcagatgggaaaacccaatactgtcaagggctcagctcttcccaacttcagctatagattcaacacaaccccagcaaggtgtgtcatgccattgacaaactgactgtaaaggttatgtggaaagcaaaatacccagaatagcccagagttttgaagaagaagagcagagtcagagcctgcacttcctgacttcaagacttgctgttctgccttgtgggtgaatgggccaagcagactgtggcatgtcagctccacggggtgttatttggtgataaaaagaaatgagctttgaagctgcgagaagacacagaggaggctgacacacctgctaccaatgaaagaagccaacctgaaaaggctacacactgtgattccaactctgtgacactctggaaaaggcagaactgtggagacagtgaaaggatccgtggtgtctaagctccgagtttagggaatggcctctatttcacgttctgtccatgctccataagtcgctgaaacatctcatgctgtctcctgtccatgaggcacccacatccaggactgtgcgcctagggctgggccgggtcacagcacccagggccaggtcagaccacagcacccagggccgggccacaccacagcacccagggctgggccagaccacagcactctgttttttcctgaaactcctgcccaccccagtggtgacccagtaccttggcccatggtgctgtggtcctcaggttgccccctctgttcctcctgccatagtggggtggataataccccagaaactgcaggttggagctgcttgtgggacacaacacactgctccaaagcggtctccaggaacctcgttgacacccaggagtgtcacctcagtggcccaggagccatcctgtggcatcttgcaaagaggccagcagccacctgcccactggacccagcaggagtttgaggaatggatccctgccatccttgatcacaccccaccttgggtgtggagctacctgtccataaaaagaaaggctgaggcctggttgtgaacaatagtgagacgggccctgcccatggcgaggcctgtgtccctgggcctggcctatccactggggggtccaggaaaggtgccaagcagccactggcaaagcccatctgggaggcaccctgccgcgcgctgcctctctcaccatcacacataaacctcttccctggaatatgagtgatggaggctggatacggggaggaaatcgatgttattaaataaattcatgtgaaggtctgagtgaatggtaattctacagccctcttaaatatattcacgggtttaaaagaggatgccaattagctcctgtaaatctgcagtctgggagctctcaggcgataatggagtggagtgtcagattccaggtcatgggaggggaatttatgagccacaggcatggagtagccggcccgctgggggtctgttctgggtcggacccctcatcagggcctcctctcggggggcctctctggctcccatcgggctgaagtcgggtggaaacaggttgtgctccaggctggttggatggggcacagtgatgggatagtcacctcgtccttctggtctcttccagctaagaagtatagaaaggtcgctggcaaagagatctactcggataccttagagagcacgcccatgctggagaaggagaagtttccgcaggactacttccccgaggtacgtagcgaggctttctcactgacgtgtttacttctcagagtgagccagtcagaagtgacatggaacacggaattttcgcattgcactgttactagtcacagctgcctgttgttacctccgataatctgtcttcctgggagtccaggcttctgtggttggtctgggctgtcacacgtaagggcagtgagaatctaaggcattagcaccaagtaatcagtaagttcctgaatcctcatatccaggagaaagaaccttcgccaaaagatgtaggaaaatcattcagctcccttggcgtgcacctggggtctcccgcacgcccagctgggagagggtcaggctgactggtggtaaccaagacagtggctgacagtcctgtgtgcccgtggtgtgagtgtggggcaggggcacggtcctgtgtcagatacagccttggtggttgtgccaggctgcgagcagcagggtcccggcagttatgcctgcgtcacacggagagattagaatcaaaatgtgtggaaggcatttgtcgtctcactgccagacacggtgttgatgagaaattggtgtttccttctggcggccatgcactttgctgagctgtgtgcgcggctgttgctctgtgcacgtgatctttgggtaaacctcacacgcggcattgtcggcgtctccctggctgtgtagttaacctgtcgaggcagcgtttgctgctttgcccttcctcatctgctgaatcacagtggggtgcaggcactgtggccagaagcagcccaggcactgagacggaagagctggcagctggacgcaggtttgggggcgtccaggctgtgatataggagctctcgtccggacttgtctgcgcaggcagccccaagaaggattgctctgcggtcctgtctccacgagagctgtgcaggctgaggctgctacggagctgacttccagcaaggccacaactttattaacttgctttatggcccgcaccttgagtgagggactgtggccgcccgtgaaggatggggtgctcctgtcaccctgtggctcggcctcctcatccgtcttcccaaggccaaggacgccgtgtcagtgggccagcctcctgtcctcggtcctgcttccggcaccgcccgtttgcctccctccgctccggatgtccagcagttggaaaggacatgcaagaaagctccatggtcttctccacgcacagtagttgcgtccctgggtcatgacagcctccctgaaggggccacctgtggtgcaggcccatcggaagggcagggcgggggctgtggtgcaggcccgtcggaagggcagggtgggggctgtggttcccctggagagcctgcgagctgaactctggcctctcttgaacccgggcaaggctctcatctcagagtgaccagagaccgactcagggccctttgtgggaagcgtgggtgctggggtgggggggggctgggctgggcagggccaggcgctgccacctgatggcatgaggagagcagctgtgggtggctgggctggtccaggcagaggctgttgacccggcacctcgtctcaggacccatgtggctgcattgctgtccagggccgtggccggaccaggtgctgctgggctgtcccctccccaccaggtgtccacttattcactgggtcctgtccactccggatggggtaggagagcccatagggagccccatagctcttgggggtgggggccgaggtgtgtcctgagaggccagggcccgcagggtcagccagggtgggaagctcgggggcagcgggccctcagcaaggaacagacactctagggtcctcccaggcagccacacaggctcctgacccctccgtctctcagccccgccccgaagcagccctgccactctggccagcgggacctccttcttgcacccatgcctcaggcttctcttttggacccagcaagcggggagctgaggcccggggcccagactgaagttgggcaagatctgggggcctctgctatgactttgccaccctttgaagggtgggtgccctggcaggggtctgagtgtggcccctggccttggtccctaatgccagtactctgaggcctctgtgatgctgggggcctgctggcatgggtctgtggagggcatagcacgaggggccgcccctcccccaggaagagcagcctcaggcccggtttgtatagaaaccccagcccccagcctgggtccaaccccagtgttgtgcagtgttgtgtccacaggcagaggagaaggcacattctggaaagtagacgattcctgggaggaaaaggcaccgagcctctttgtgtggacccgtctctcccctgggaaagcagcgtgtcgctgtctgcggcctggtggtcagctgctcagcagatccttgtggctgctggtggctgggacggggggccagcccctgccctgggccgaggcctccctgtgggtcagggccagccctgccacgtcatcgtcttagaaatcctcccgggacccgtgtgtttgatgatctgcaaaggttttctgacgtttcctcttccctggtaaattaacaaaaggaaacccttattttaaaaactgtaagcttctaacattctgtccctagtgtgggtttttaaccccacagagcctatgtggcaccctgtgtccttgctggagggaggaaggaggagggaggggcccggggagccatgggagtcccggcctggcagcctggccgggcccgcccctccctctgtgcctctgcacccgacctctcgctgtgtttgaacacattttggaggaaggaactagtttcagactgatttctctttcttttattaccatcacttaagggtaatctaaatgtaattaccttgatgggggtataatgcagtctcagataattacagccgcagcagaaactaacaaaactttctctgctgatttatggatgcttttggcttggtatgaatttcaaatgatgcctctgggagccacactccagataatgtgaggccatttttaaaacgcagatttgtgtagtcgatcagggtgagtcatttttttccttttgcccgtagtgagaaattggttgctaccatagatcacagggccggctgcaagctctcatgaaggatgaattaattccactaatgctctgagcgggccttcggcgtgagggttgtgtggcaataacctccccgcagcctctcttttctccgtggcgatttatgccgtcttttagtagatgaaaccggctggattcgctatccatctgcctgctgaaggaaccctattaacaggggcctgagagagacttcatatcatcaggtgaaggatgtacccccacccccacgggatgtgggtgtcatttctgaggtgaaaacctctctgggagtagaggagccaacacaggccagggggcggccacctcgggagagcggagccacggccgtcccatctgcaggctcctgagggctccccaagtgagggcttcgaaggtggccggtgaccagaaagttcccgcacacagcctgggatggaggagacccccagccctggccatacaccctctgcctccatttgccgtggctggagcaacaagtatgtacatccagaagcttctggggtcttcctgagtcctgagcatgtgagcgttggctgaggccccaggacgcccgtctctgcctcccagcacttcccggccctgctctggaggacagtgttgggtgtggggtgcatccacctcaggctggggtgctcaggtgcgcccgtgggggcgtggcctctgggaggggcccctgaacctgctgatgactctggggacctccttcctcttgggccaccccaccccaccccagccctggctgcctgcttggggcttggccagcaaggggagtggggcgtcgggaggcggggacttcagtgcaggaattggggcggtggttcccgttctggttctttctccaaagagctggaggtcttcaggccccagtttcctcgctggggaaatgagggtggtacctgtcctgagtgctggtggggccaccgaagggtgcatgggacgccctctgtgaggactctccctgcaccgcgcatcccaccctaaacccaaggatgcgaccgcacctgcagccacgggccgtggaagtgtcaggacactgtgggctgtggcttcatttgttcctgctgtaaaatccctcgaaacatagtcttagtgcagtggtagctgctctgacgagcttacctcaaaaggaacttattttctacaaatactttagaaaatagttggttatgataatatactgttaaattttctgagattcatttgcaatttatttaaaaatcttagaatcctaaaactacagttattaccaatttatattattcaaaaataacattgtttctcgttttatttattcagtctatggataattaatgttggaaaaaattctccattactgtggaaaacttaaaaatttaaaaaaccaagatgtacccacatgcacatagattcaagacacacaaacacacaccttaacacaaataatcgaaaactcaggagaagaataattaattttggttcaaaaatttacaaatgccttccatttttaatggaagtaaaactgttgacggttatcgcaaattctaggtaaaaacctgggcatgctcagtttggggtctctgctgtacctgtcagaattcagaggcgtgcgtgcagggaggtgctgtgtccctgtgtcccgggccctactgcctgcctggaagcaggagaggcagtgcccgggcacagctctgacgcacatgggaagcgcttgcctccacatgccacggagcacctctgctctctcgttccacagtgtgctctggggctctggccccatccagcaggactgagacccatgggctgtcctagcagaggatgtggacagcgcctgcacccaggaagtgggctgtgggatgcttggggtgggccggggcacttgtttacacaggggtgactgtgggcttgggggagtggcaggggcactaccgcgagtctggacgtgggagctggcagagggcgccctgccggtgctggttaggagcggcctccaggctccctgccgagcccacacaccggggttgggactcccctccctcccgttgggtgccccccacccttcggactcaccgtttctcccagaggagctggtcctgactgtctcacaaggccagcttcccctgcggtcacccctgtgacttggtgcaggcaagacacctgtcccggtcgcttggtgattgcatcagcgaggacagatccgggctcttgtgattgtcatcagctggcgaggacatggatctgggctcttgcggtcgttgtcatacgtgcctcctgcacaaccctgtgcccgcggtgcctgtcttcccatccatgttgaccgcaggtttctcacccgccagccgcaggcccctgatggagttggtttctggggaactggccctcggccatcttcacacacaagcggcttcacccccccacatacacacagcttcacccccacacacatgcttcacccacagacacacgtggcttcaccccccacacagtgtcttcacccacacacacacacacacactcacatttacccatacacacacgtggcttcacccacacacacacgtggcttcacccctgcacacacatggcttcacacacacacgcacagcttctgccccccaacacacgcgcaccttcatccccgcacacccccacacacacacacgtgcagcttcacccccgcagacacatgcggcttcaccccccccacacactcacggcttcacctgcacacacatacacgtacggcttcaccccccccacacacacacacagcttcacccccacacacacgcttggcttcactcccacacacacacgtggcttcacccccccccacacacacaagcttcacccacacacacacgcacggcttcaccccccacacacacacgtggcttcacccccacacacacacgcaagcttcacccccacacacacgcggcttcacacacacatgccacacacacgcaagcttcacccacacacacacgcacggcttcacccccccacacacgcgtggcttcacccccacacacacgcagcttcacccgcatgggttctgaaggcttggcctgatctctgctgcagcatctggttcccaaagcatgtcaggccccccagtccccccagacaggaggtgtcgaggcacggaagatgagctgctggtgctctaggggagtcgtgtattgaggcgccttggcctgcagggacggtaccttttctcctggaaagacgcctgcctcccactgtcactagtagaggggcctcacccagttactgtagatttgtcaccagtcacacgtccagccttctcccatgacagcccccatgggtgagaacccagccttgggcccagtgactgtggcctaaagccaccaagggaccataggtgcagttcttaacctgtgagcctcagtttccctttctggtcggcccgagggttgggtgtgtgcctgtgtgttggacgccagcccgcggcggctgctggtgcgcagagccacccctcgcagcccgccggcaacatgggctctgtcctcccctccttgtacccgaggccccacagctgggacttgaacctggcagcctggcagtcctgtcttacccactgccttgaggccctgggtgctgctggtgtggatcctgtgcgtggctgggccgtgggggggcagtggctgttccaggtgggccgtctccccggaaagtgcaggctggatttggacgtgtgggagatggaggaagggcgtctagtcaggcagcaggcagctcctctggagtgtggaggatggaggaagggcgtctggacaggcggcaggcagctcctctggagtgtggaggatggaggaagggcgtctggacaggcagcaggcagctcctctggagtgtggaggatggaggaagggcgtctggacaggcggcaggcagctcctctggagtgtggaggatggaggaagggcgtctggacaggcggcaggcagctcctctggagtgtggaggatggaggaagggcgtctggacaggtggcaggcggctcgtctggagtgcaggctgagtggaggggagagagtccaagcattgggggtgtcccagctgcaccgttggtgggagcatggagcccgctgtggggcatcagcagcacccacttctccccacagctcagcttcccactgatgtgtttccattgcagacacagttaccgacaggaaatgaacacagaggctccccggggcaaatggcctccccgagagaggaggcggacatgtttggaatcagagacaagtgtctggtgcagcacgcagggagcctgccaccccgccaccccgccatagagctccctgggtcgtctgggcatggccccatgcagcagccagaccagtagcctggggatgccttggccagcctcctggagctttggcacagcccatgttgtttggcaagcagggcagcctgagcacagcaggggatgtgggctcagtaccagagccagctcgtggtgtgaggacggatcctcctcgacgagtagagccatagcctggcgtccaagtgcgtggccaggccgggaggagtgtacaggaagtctctgtaccttatgctcaattcttctggaagcctaaagctgctctgaaaaataaagcctattacttctttaaaagtctgcttacctggggcccgggactttacaggtgagggaagaaggaccagccctggaaggaggaagcttggagccacctgtggaccctgagggtgcgtctgtgggtgcctcagtatcactggggagcagagagcccagaccttttacaatgctgggtggggtggccatggaactgcacaggtgaggagggggcgcctctcactccccaggagactgcaaaccaagaacgtctatgagacgagcagacaccagaatacagactcaccccaaataaagttgatttcttgggaaaagctgacagactttaagtatgtttaaattgctcaaagagataagtgaaagatagggttcattaaaaatgttattcaactaaaacagaaataaaacaagaaaagggaatatgaagaggagcctgtagaaacattaaacattctgcattagaaattacagaacagattctagactagatgtggtcaaagagagaatcagagaattagacaatgtcattaaggagttcatctaaacatagtcaagacggacaaagatttgtgtttgtttggttgtttgtatgttttttatttttatagaaaggagcagttaaaagacataaagactattaagaggctcaaataaactcaaaataaattccagaaagaagcagtggagcagtgttggaagtgataaggggaaattcttaaaaatttaattcccgagcacaatttggatacagagcaggatatataaaaataaacccatacctggatggcagtgaagcttcagaatattgatgacaaagagaaaaactttaaaacagccagagagaggaaaacatacattcagaggattcacagttcgtgtgccggggtgcttcttacagcagtggtggatccagagtgcaggggaagaatgcagtgtgtacgggaagggttggctggcttcagcatcacccccaccagtgtgtggggcttggaatttcccttcttgagcatgagtgggagcacttagggagggggcagggagcacttgtggtgggggcaggcaaagaagggcctcatgcctgggaatccacagccctagagccttgcccaggagggagctgtgggggccactgtcctggagggagacagggagaaggagacggggctgcaggggccactgtgctggatggggaccaggagaaggagacagggctgcaggagccactgtgctgccaggtgccgccaacaggccaggcgagatgaagggcgagtgtctgtaggagtttgcctgtggaggctgtggtgaccttgcagagagcatttgggcagctgttgtctggcacgtgcgcatactggaggagccaaaggggacggtggccagtggcaaggtggggtcaaagggagagcctctgatcactgcgctctccgtgttagatagagggagcacgccacgctggaccctttcttcacgggtgtttcgtccacagttaactccagattcccatctgctttcatctcctcagcagaccttagggtgtggtggaggagacagggtcttccctgtcctgctttccttctctgccagcccatgagcaccaagaacagcagcccctgtccacctccgcccccgatggcgccaggcatatggctgctgctgggaacggaatgggcggtgccctgccctgttggctgccgttcccccgccactgcctgaagcgctttgctttgtggaccttggacttgactctgtcagcctcttcccagtgccttctgtggttttcaagggtttcccaagaggcctaggctgtgaagctaccctgttctgcatggctgtttaaattaaaattaatgaagataaaatggaatctaaaattcagttcttcagtcatacactttgcacgctcggtggccccggtggctggccactgctgtactgggtggcccagcagaggaacctaccatggtgggaggtgggagggcaggagggcctccatgccatctcgaggggagccctgccacctcttaaagaacacccctctttggaatctcatgctgttgactgtttcacttgaattttgggggtacttttagaccagagctcaggctctacgttcggtggctctgctaggtggtggggatcagtgagaggcatcggtgggtgagaggcatcggtgggtgaacggcatcggtgggtgagaggcatcggtgggtggtggggatcagtgagagaccacacacactgttggggtgggcaggtcacccactgtccaggacgcctggctgggcacggctgctcaagtcttccctgtggtccagccgagggcggccgtgtgtctcgagctccctgatcagcatctgtggtgacagtggtttccctgcagctgctctcacatgggggcatggggctcacaggcggcaggctggcacgtttcttcatatcttccccccaccccaccccaggctgggcatcagcagcccctgcaggcatctctgtgcgaagccccacttgaggataggtgcacagctcggttctctttagtggggcggcatcagtgccggaagagccctgctgttttttgtttggaaagcatctcctgtgtcctttaggtgtgtgggacccacgtgttgctcttgctcacttactctggctcatttgtgtgacgtgtttatttttcagtgcaaatggtcaagaaaaggcttcatccggacgaggtggtgcattgcagactggtacgtggtgtctgtgctttgtcaatttccataacgtttcttacccttttatatcttgcaccagcggcatgttccacacacctcattggaggctctactgattttgcatgaggacccccagctgcctgacccccacctgccactctgacccttttggttcacggcgatgcattcggagcattgtcactgttccctgtaagtcagacatctgggtgcccagtgccaatggagacacagtgacggccccagtccctccccgcagctggagagttccgctggccagagcccgctgcacagagaagtcagcagggaggccccctagtactggggccctgtggctgcccagtgagacggcgtaagcgctgcctggcagcctggtccatcagcagactgagcacagacgtagcggagcctgcgtctcatccacatatcctctggcctggcctttctgcagtgaacatgttctcgatagcgccgccccaccttttctgcatcataagaaacagaaacctgttatctgctttcctaaggtggcttccaggtggctccccaacgtgtccctccagccatcacatctcatttgaatactgttttcattttcttttcatggattttccaaaacttggctgcttgattatctgctgccatgtaacagaccgccctaaacttagcagctttaaaaacacatacgaggtcatagctgtgagtgtctcaggacccaggagtggcttttctggggctctggccctggtcaccttggggcttccagaggactcatctccgagctcactggggctgtgggcaggggtttctgcccctccccctcgggcctctccctggggctgctcagggcaggacatccccaggaggagcaagagtccagaaagtgagggggatggagggagggaggggggaggagggggaggaggaggggatgggggaaggagggggagggggaaaagaaggaggtgggggaagagtgagagagaagggtaggagaggagaatggggagggggaagagaggaggagggaggaaggagggggagagaaagaggaagaagagggagggggaggacagagggagctgagaaggagccgcggtcccgtgcccaccccaggcagtgcaggctgcaggctgccctttgctgttggtcacagggaacagccttggcatggtgtgggggcacatggggcacgttcaccaggcagcgtcatcggggtcattgtggcagctgggccacaggctggaggagggcaagaccgcctgcacgcactcattcctggcgcctcctggtagggagacggccaggtcttggagcctgtggaggacacgcaggcagtgagggctttgtgggacagtgtccagactgtgccaagccctgcactgacctcccctggtgagagggcacgtccttgccagctgaaggtgctgagggtcccctgcagtgtgacagaggctcaggccttgatcaggccttgccgagtccatgtgcctgcaggcccacagccggcccacggggcttcccaagggtcttccctttgggagtgaaatgaagcactcttcttgcctgtccctgtgcccccaaccctgccttacagggtccccgatgggtgcagccggcagccctgagcagcatcagctgaggctgaggggtggcccttcctcttagcttagccatcagggagagtttccatagtcacctgtaagtttttctctttaaagaaaagtagctcactttttagttgcccagagtaactgcatttgtaaagacatattcagacttcactggaggtttcctgacctctggccttgtcggaagacaggtgggtggacaggtgccccgcctcgggtggctccgcacggcggaggccagtgcaggtcttatcttcccggggactccttgggagaacgaagtgtgacccggaggctccggcccttggtgacgtgtccttttctcttttggttgcagtgcctttgacttggtgaatatccatcttttccatgatgcttccaatctggtcgcctgggaaacaagcccttccgtgtactcgggaatccggcacaaggcactgggctacgtgctggacaggtaggtgtgggcgggcaggtaggcgtgggccgggcaagtaggtgtgctgggcaggcaggtgtgagtggagaggtaggtgtgggcggacaagtaggtatgctgggcaggtcggtgtgggtggacaggtaggtggggtggacaggtcagtgtggatggagaggtaggtatggatggcaggtaggtgtgctgggcaggtaggtgtgagtggacaggtcggtgtggatggagaggtaggtgtggatggcaggtaggtgtgctgggcaggtaggtgtgagtggagaggtaggtgtgctgggcaggtaggtgtgagtggagaggtaggtgtgctgggcaggtataggtatgggtggagaggtaggtgtgctgggcaggtataggtatgggtggagaggtaggtgtgggcgggcgggtaggtgggtgggcaggtcggtgtgtccactcaccctgttggccactgggaaaggctgtgcctgctctgggaggcacactctgctctgcgcttgctgatttgccgatgggccttactggagttgccccatggaggtggcagagcccccaagccctggcaaaggctggagctgcaccctcacaatggacttggatggggatggcttcactttctctctgacttttttgtgggaaagataagaaaacggtgccatggggtgctgtggtgggaggtgaataggacactgaagagtcagtgggagcgtgggggccacctccacctgcgcctgggcccctgccccccagtgctccgggctgctccaccggtgatactgtggagatgacgggctgtcactgggaagcaggggacccccattggtgggatgtgtctgatcttggggcccgtgtccctccccatctacagctgggccttttgctgaagctcaggccccacagccaggcagtctgggtttattctctgcccattccagttaggcctgtcatggaaacctttcccgccagcatccctgtggttgacaagacagtgctccgtcagcttgggcttgcagcagtgatgaacacaggcctgagaccagcagttctgccctggggtggtccctgatttccacctgaaccccattctgctccctagagggcccctgacctgagcccccgcccagcccccgtgcgtgcagaatgcggagttacactcccgactaagcgtgcgagggcctggagctgccctgcgcctcgcccaccttccagcagctggcatcctcagacgccgaccttctgttcccggggccggttctctcccacccacacctgtcttagcctggacttgtgcagagcagaataactgagtcattcccaggccaccactgtccctggggcagtcacaactgcctggggctgcacaggcagaggcagggattggcaggcactgaggtctggacccagagagggaggaggctgggcagggcctggtaccctctgagcctctgggaggcttcctggggaagacagtgggaggagcagtccatgtggaggggtccgtgggtggggcccctgccccagagtcatgtgtggtatgtgaccagcgccgtcagatgctcaagagcaggagtgggagagtcctatgagaggcacccctggggactgtgtggagcacatttctacccaagacccacgtcctgaggggtccctaaggcaggtggggttatgaaggagaacagcagccagcaggtccctgcctcctaatagtgccttgtaaggatagtgttcagtgtgcatgtgtgtgcctgtgcgtgtgtgcatgcctgagtgtgcacaccttgtgtgcatgcaattatgtatgtaattgtgtgtgtgcacacatgcacatgcatgtgagtgtatgcacagttgcttgtggggtttgtgtgggggtgggtgtgcgcacatctgcgtgtgtgtgttcgtgtgtgcatgtgtgtggatgcttgtgtgtgcatgtgtgggtgcacgagtgcatacatatgtgtgtgcacgcgtgtgtgggtgtgtgtgggtgcatgtgtggtgtggatgtgtgtgggtacatgtctatttgggtgtgtgcacacttgcaggggtgtgggggttgcattgtgtgtgcacacgtggacacatgtgagtgcacttgtgtggctgcatgtgagtgcgggtgtatgtgtgcgcgggtgtgtgggtgcatgtgtgtgtgggtatatgcatgtgtgggtgcatgtgagtgggtatatgcatgtgtgggtgcatgtgagtgggtatatgcatgtgtgggtgcatgtgagtgcaggtgtatgcatgtgtaggtgtgtgtgtaggtgcatgtgtctgtgtatttgggtgtgtgcatgtgtgcaggggtgcactgatgcatgtgtgcatgtgtgtggggcctcgtgtgggtgcatatgtgtaggcttgtgtgggggtacgtgtcgatgtgtaggcctgtgtgggtgtgcatgtgcctgtaggtgtgtgcatgtgtgtgggtgtgtgcatgcatgggtgtgggcgtgtgggtgtgtgggtgcatgtggatctgtgtggatgcatgtgtgctaaggtgtatgcatgtgtgctggggtgtatgtatgtatgtgtgcgtgtgtgtgggtgtgtgtgcatatgtggggagagcatatgcacgtgggttggatatgtgtgcaggtacatgtgggtatgtgtgcatgcaggttgtgggtgtgtggagtgcatgtgtatgtgtgtgtgcgggtgtgtgtgcatttgtgggtatgtgcacatgtatgtgtgtaggtatgggtgtgcacacgtgtgtgtaggtgtacaggtgtgggtgcatgtgcacataagtgtgtacctgtcatagctcagcactgtgcatcctgaggaaggggtggaaggctgcattctccagtaggtgtggctccagggggagttggagctgatggggcccctcctgaatgctggctccgtctgctgctgtggtgagtgtggcctgcgtggctccttgcctgccgccttcacgatcctcccgggttccccacagggctctgcacaaggagtctgggctgggctcccatccctgtgctgttattagcgggtatatggccttggctctcctctgcatctggcccttgctgagggccctgaggcgtggccccttatcccctctgaccgcccctgacctccgtctccagagtgatggagccctggtcccctgccactagcctggtcccggggagggtggcaactgcgaggcctgggtgctgctgtgctcgtggccacacactgaggccggccctcagccctgtgcacggccacaccctctgcaggggacctgtccggcctcccggatatctctggagctggcactgacaccgaggcagggatcggtctgagcctggggactgtgctctcaactgcccaccgtagggaagcagcacaggtgggggatgggggcctggggctttgtcagcgacaaagtgactgatgaccgcctgtgccctgggcgccctccctggacagcatgtcagtcgcccagggagaagggcctcacccacaggagcggcgcggttcttcctgcctgatcagccctcggcttgcaggcaccaagcgtctcggggacctcccacggagcccaggagcagggagggccctgccgtgtctgctgttgggtcttggtgacagcggttaggttgtcagcatggcatggcattaaaatgtgtcattgcccctcgctgccatggctccgcggcctcaagaaagcagcctttgggcttttgggccacttttctgcgtctctgcattcccatgaatggctcctgcggcgcgctcagccagccgcagatccggacctccgcggcgtggggcgggccgcgcaacacaaagggcggctctgtcggagtctggaacaatgggtcgccctttcaccgcggctgctaacctcttggcagccaccagcagaccacattctgctgtgcggatcgggcaggacaatgccgcgcggcctctgaatggacgctgccaccaacggggccccattcacggcgttgggaaccgggcgcacattgtctgccccgcagggagacagcgaggaggctcctgcagcctcttcctggtttaatctccccgcgcggcttcccaggtccatgtcccgtatcagctgcggggccggcagcaccaggcccaggagggagggcaggtcccagccctggaggaggatgcaggccaggttaaaacccagaggcaccgtaggaccttcgcaccgttgctctaaacctaaacgcattccagagtaggaagatgattgtaaaacaactgagagacaagctctgagttaaagtcttcagaagcagccccagggcgagtgctgcggggtgcctgccaccaccacagccagtcacagggctccactggacttcttatcacagatgcgaacctttacttttttgtgtgtaatttttgaaattgttgctgttaacctcttgttatgagaagtttaaaaagaagacaaatccctaatgagtgaggaggaccaggctctgggcaggtgttggcggcatctgtgctgggctggggtcctggaccctgggtgaggccgggccgtgcacacccttgtgtggctcttggaggcgccgagcactcagcccgtgttgggggcagccccggtccctctcctggacacacaggtcagcccttggggggcatctgggggctgagccagaggtgcacgtcagccttcctaggcaccatccactgaggcgtcccgaaaccttcctgagctttcagctggaaaggagattttcccataagtgacgggactctttgtctcccctctgaaatgtggcctgggctagttcaacagaaacattttacattacaactgtgaaatctcggcataaagcacccctttgtccccccattattttctcacaaatacagtccattgtcatggcgctgaagttaatttgatcaacattgggacatttaacttttatgtccagtcaaaagagttgtttcatgctcattttgggcattcaaaggaaatgattgccagaaaaataatgttcttctgaacaattccaagcaattagtttcccagggagaggtgacgtgatgcccgcgccccagccccgctttgtggctttatggagggccatcagttagctgtcagccgctcaaagagcccccaacctaaatgtttctctttagacgttcccagaacttgccttgctgtgcagccagtaaagaaaagctgctgcgtctccaggcaaaggcaaactcggcattaaagatctgggtcaccctgagcgctcctggccacagggctggttctcgcgctcctcacactcccgctggcctcggagaacagctcacaggctcttgctggtcgtgggctcgtcccaatcaggctttctcagactcggagacctcagggtggccgaggtcatgtgtctgtggagcccaccaggcaccctgtggtgtccctccgcatgcccgggactcctggcagcacaagcccgtgccctctgccgttccgctgccgtgaagcccgctgcctctgtgtcgccttagcctctccagggcgtggtcggtccactgctgcccggcaggaggggctcctttcgcctgtgcctcagctgatccatggctgcgatcttcattttgttgaacatggagtcaagagccaagaaaggtggtgccgctatgcagatgcaggggcagcgcctgcacccgccacgcaccctgcacgttctccgcatgtttcctttccttaagaaacaaaccatgtgggcccgcaggtgccccgtcctccatcctgaaccccatcctggcccccagcatcagcctgaattcagcacctgtcgctcctttgcagctttctggcctcttgtgacacaggcacggatgtttctgtacttttattatgtgccagctggaggcaagcgtcgacgtgacgttgctgtgacgcctgtgtgtggtttatgtctttacacatgtcatcgcctgtgaccaacatgtccagcatcctgtgaacggagtctgccggacgtctccacgagctccagccacggtgctcggtcatgggactcgctgccggctgtctggagagcgtttgggtggttcccggccctttggtggcagacaggacgatgcctgtgctgggccatgggggccgtgtgtctccactcccgctggtcctttccacaccctgaaccccagcgtcaccactggcatctcagccagttgtgttttctgctagctggagaggagtggggggtcctggaggttgaggcacttctgtgccgcaccagtttttgtggtttatggcggtgtccaagcagagtttgagagggtgggtctcagagtgagaaaaacaaaagtaaaatggcgatgctccgtgtggagagcatgagagcggcggctgccgaaggagagccctgcacagccctcctgccgccctgcacggggctccccgcacgactctgcccgagagcacttgatgtggggatggactcatcgaagggagtgtgggctttaaaaggtgccagacactgagaaggcacatactgctggggcccaggatgcccccagccccaaggctgaggtccagaggccatctcagccccgcccaccgcaacacaactctgtggcggggctttgcagccgaccttagttctcagtttgagatctgagttctggtgacagcttgcagacggccgccttctcactgcgtcctcacgtggtggagggagggagggagggaaggtgagcttttggtgtcttcctcttttacaaggacacccttcctcttgcatcagggccccgcctccctcccccacccccgtgacctcaggtgctggcccctaaagggttggggctccgaggctgggactcactgggtggggaagtcagggggcctttgggtgcggcactggggatcagcgggttggtcaaggagcttcctcaagagcagtggttgctgtgactccacccagtgagcagcctggctgccccaggcactttgggggctctgctagccctgaggctgaccctgctgcttcagaacatcccgccatctgcctgggttctgcctggaggagccttagacgactgtcttcagggttctgtggtacctgggttctgtctgagggcgccttagacggctgtcttgtgggttctgtggtacctgggttctttctgggggcgccttagacagctgtcttcagggttctgtggtgcctgggttctgtctgggcgccttagacggctgtcttgcgggttctgtggtgcctgggttctgtctgggcgccttagacagctgtcttcagggttctgtggtacctgggttctgtctgggcaccttagacgactgtcttcagggttctgtggtacctgggttctgtctgggcaccttagacggctgtcttgcgggttctgtggtacctgggttctgtctgggcgccttagacggctgtcttcagggttctgtggtacctgggttctgtctgggcaccttagacggctgtcttgcgggttctgtggtacctgggttctttctgggggcgccttagacagctgtcttcagggttctgtggtacctgagttctgtctgggcgccttagacggctgtcttgcgggttctgtggtgcgtgggttctgtctgggtgccttagacggccgtcttcagggttctgtggtacctgggagctgtctgggcgccttagacagctgtcttcagggttctgtggtacctgggttctgtctgggcgccttagacggctgtcttcagggttctgtggtacctgggttctgtctgggcaccttagacggctgtcttgcgggttctgtggtacctgggttctttctgggggcgccttagacagctgtcttcagggttctgtggtacctgggttctgtctgagcaccttagacagctgtcttcagggttctgtggtgcctgggttctgtctgggcgccttagacgactgtcttgcgggttctgtggtacctgggttctgtctgggcgccttagacggctgtcttcagggttctgtggtgcctgggttctctctgggcgccttagatggctgtcttgcgggttctgtggtacctgggttctgtctgggcaccttagacgactgtcttcagggttctgtggtacctgggttctgtctaggcaccttagacgactgtcttcagggttctgtggtgcctggtttctgtctgggcgccttagatgctgtcttcagggttctgtggtgcctgggttctgtctgagcgccttagacggttgtctggcgggttctgtggtacctgggttctgtctgggcaccttagacgactgtcttcagggttctgtggtacctcggttctgtctgggcaccttagacagctgtcttgcgggttctgtggtacctgggttctgtctgggcaccttagacggctgtcttcagggttctgtggtgcctgggttctgtctggacgccttagacggctgtcttgcgggttctgtggtacctgggttctgtctgggcgccttagacgactgtcttgcgggttctgtggtacctgggttctgtctgggcgccttagacgactgtcttgcgggttctgtggtacctgggttctgtctgggcgccttagacggctgtctcgcgggttctgtggtacctgggttctgtctgggcaccttagacgactgtcttcagggttctgtggtacctgggttctgtctgggtgccttagacggctgtcttgcgggttctgtggtacctgggttctgtctgggcaccttagacgactgtcttgggggttctgtggtacctgggttctgtctgggcaccttagacagctgtcttcagggttctgtggcaactgggttctgtctgggcgccttaggcggctgtcttcagggttctgtggtacctgggttctgtctgggcgccttagacggctgtcttgcgggttctgtggtacctgggttctgtctgggcaccttagacggctgtcttcagggttctgtggtacctgggttctgtctgggcaccttagacggctgtcttgcgggttctgtggtacctgggttctgtctgggcgccttagacggctgtcttgcgggttctgtggtgcctgggttctgtctgggtgccttagacggctgtcttgcgggttctgtggtgcctgggttctttctggaggcgccttagacagctgtcttgcgggttctgtggtacctgggttctgtctgggcaccttagacggctgtcttgcaggttctgtggtacctgggttctgtctgggcgccttagacggctgtcttcagggttctgtggtacctgggttctttctgtgtgccttagacggctgtcttgtgggttctgtggtgcctgggttctgtctgggcaccttagacgactgtcttcagggttctgtggtacctcggttctgtctgggcgccttagacggctgtcttcagggttctgtggtacctgggttctgtctgggcaccttagacggctgtcttcagggttctgtggtacctgggttctttctgggggcaccttagatagctgtcttcagggttctgtggtgcctgggttctgtctgggcgccttagacggctgtcttgtgggttctgtggtacctgggttctgtctgggcgccttagacggctgtcttgcgggttctgtggtacctgggttctgtccgggcaccttagatggctgtcttcagggttctgtggtacctgggttctgtctgggcaccttagacggctgtcttgtgggttctgtggcacctgggttctgtctgggcaccttagacggctgtcttgcgggttctgtggtgcctgggttctgtctgggtgccttagacggctgtcttgcgggttctgtggtgcctgggttctttctggaggcgccttagacagctgtcttcagggttctgtggtacctgggttctgtctgggcaccttagacggctgtcttgcgggttctgtggtacctgggttctgtctgggcgccttagacggctgtcttcagggttctgtggtacctgggttctgtctgggtgccttagacagctgtcttgcgggttctttggtgcctgggttctgtctgggcaccttagacgactgtcttcagggttctgtggtacctcggttctgtctgggcaccttagacggctgtcttcagggttctgtggtacctgggttctgtctgggcaccttagacggctgtcttcagggttctgtggtacctgggttctttctgggggcaccttagacagctgtcttcagggttctgtggtgcctgagttctgtctgggcgccttagacggctgtcttgcgggttctgtggtacctgggttctgtctgggcgccttagatggctgtcttgcgggttctgtggtacctgggttctgtctgggcaccttagacggctgtcttcagggatctgtggtacctgggttctgtctgggcgccttagacggctgtcttgcgggttctgtggtgcctgggttctgtctgggcgccttagacggctgtcttgcgggttctgtggtgcctgggttctgtctgggcaccttagacgactgtcttcagggttctgtggtacctgggttctgtctgggggccttagatggctgtcttcagggttctgtggtacctgggttctgcctggaggagccttagacgactgtcttcagggttctgtggtacctgggttctgtctgggcgccatagacggctgtcttcagggttctgtgatacctgggttctttctgggggcgccttagactgctgtcttcagggttctgtggtgcctgggttctgtctgggcaccttagatagctgtcttgcgggttctgtggtgcctgggttctgtctgggcgccttagacggctgtcttgcgggttctgtggtacctggattctttctgggggcgccttagacagctgtcttcagggttctgtggtgcctgggttctgtctgggtgccttagacggctggcttcagggttctgtggtacctgggttctgtctgggcgccttagacggctgtcttcagggttctgtggtgcctgggttctgtctgggggccttagacggctatcttgcggtttctgtggtgcctgggttctgtctgggcaccttagacggctgtcttcagggttctgtggtacctgggttctgtctgggcaccttagacagctgtcttcagggttctgtggtgcctgggttctgtctgggcaccttagacagctgtcttgcgggttctgtggtgcctgggttctgtctgggcgccttagactgctgtcttcagggttctgtggtgcctgggttctgtctgggcacctgagacggctgtcttgcgggttctgtggtgcctaggttctgtctgggggcgccttagatggctgtcttgcctgcgtctgtggtgctgggagattcaccctgagggcttgaggctttatgggggtagagctcacagtgggtggagtaaaaagtgaagtcatgaaaaatagtccagcagtttctaggaaggtaaaaataaacaggctggtatgtttattttggggggatgagtttatttaaagtggcttaaacacatctgcgatgaaccatgcagtgaggtgtttatgattattaagagaaacttttaagcgattaactaaaatattctcagtagttttagtaattttatactgtcgatgtttttgcttatgtaaagttgtttgatcagagaatgtggtctctaccatagcagagaaacaaaccaactttaatagattcccaattgtacacaacttaggcctttaaaaatacagtgccaaaggtttcagctacggtcgctttcaggggttaaaaaataaaaaaggaaagaaggaaaaaaaccaactcctagcaagttaggtgtcctggttggatgaatgtctcacggccagtttgcttcccacactgcactagctcctccttgggggaaaaaaaactagccccattcgagtctgatattttttagggccccagtgagactgccgatgacgctctcccgccacctgccctgtcaccgtggggcctcccacggtgtcccaggccccagcagcctcgcgcccggttcccactgctgtgttagggaagcgcccgctgttggaaatgtaattcggaacgttcaacccgtgactctccctaagtctttaatctgcggtgtcgtgaggtcgcagttgtcctggagacacgctgacgagccccccagccgtcgcggtggagcagctgctgggacgatgaggcagcccctcctcccagtgcctccgccgcgtaatgagaccacttgtcaaaacagagagagacacccattttcaaggcctaaaaaattgatttttatggctcttcttgtaattctctttttgaattaggcacatgatattgatgtgggcctacgttttaatcataatagctactgacaaggtaattaattttagaacaactgtttttttttctcctgctccaaatggcactatattgaaattgaaagtgagctctgggagggcagcggggctggcactcaggtgattgcctcggccgtgacagccccttcgtcttgcggccgccgtgcaccctttagaggcagctgctgttattaatgggctcaagctgttctgtcagcagagcagggcgaggaagtgtgatccagtttagggtttcatgatgatcctgcaggattccagacaggacgatgacgcggcgtctccagggcgttgcaggcccacctggtgcgtcgcctggcggctttctcgggaagaaggagcagccaggcctgggcagggcctcctgtgaggcggcaccccagagtattgagagaggaaactcggtcagtggagtgagggccagccgggaggccgcatttcctctctctccgcactggggaactcattagagtttgttccgtcagggttctgctgtttgtttagccaactgacggccgcgtctgttcctgcgacaccgcacacagatgcttggccatgtggggattggccgtgtggggattggccatgtggggattggccgtgtggggattggccgtgtggggattggccatgtggggattggccatgtggggattggccgtgtggggattggccgtgtggggattggccatgtggggattggccgtgtggggattggttttgtggggattggccgtgtggggattggttttgtggggattggccatgtggggattggctgtgtggggattggccgtgtggggattggccatgtggggatggctttggtatcttgtggtctcgcctacacctgggcttggctggctgcatcctgcccgctggccggcgggcgttgccgccctccctcgggagcctctgtgccccgggctgccgctctcctggggtctcggagcacagggccctctgtcttcctccatgcaccctccgagctttctgtgctcacgggacacagcaagcgcttccctttctcctgggcagagcttggggctcgtttaagcaaatcacactagaatagatcaaacttgttacaactgagatttaacctaaagtggaaggaattccaattaaaaaggtaaacaagactttcgtgggctttgccaagccaaactatagcaattaacaggcaagaggagcacgaaatagctgggaccatttttgaaagaactgtcaacaagaaggacttccctataaaaagttgtactaattaaaagcatgcaggaattgattttttaaaagatctgcagaaaagaatagattgtctcaaaaaaacccgtgccgctgggaatgttgtgttgagatacagacttggtgggaagatgggacacgttgaataaatggtgccgatcaattgaccgtccgcttgggaaatcgatgaacttagatccctgctctacaccttaattccggatggattaaaggataacccttaaaactctaccataaagatgaaggtgggggctccatgcccgcgtggggactggggcaggtgtctcagccacaggggaaactgatacatgtgactatatggaaattaaaacttttgcctgacagaagccaccacaggcaaaacggaaaggccagccccaggccagcaggagcacgtgttcaccacagacgggggttactcaatctccagaactcacaaggaggccccaggccagcaggagcacacaccatattcaccgcagatgggggttactcattctccagaactcacagggaggccccaggacgacaggagcacacgccatattcaccgcagatgggggttactcactctccataactcacagggaggccccaggatgacaggtgcacatgccatattcaccacagacgggggtcactctccagaactcacggggggccccaggctagcaggagcacatgccatattcaccacagacaggggttactcactctccagaactcacggggaggccccaggatgacaggagcacacgccgtattcaccacagacggggatcactctccagaactcacggggagaccccaggacgacaggagcacacgccatattcaccacagacgggggtcactctccagaactcacggggggccccaggccagcaggagcacacgccatattcaccgcagatgggggttactctccagaactcacagggaggcccctggaatcaaagagaaaaggccaggaaccaaagagaacagcaggctgtgaacaggtgaaatcgggagaaaatgcaaattttgatatgtagatttaaaaatattgagggtgtgcaagttaagatggaaatgaactcctacgctccatagccaaagtgaaatacagtggtgatggttccacccgcactcagtcatgaaagtgtgacctgcacggatgctccgtcctccctcgctctggtctaaaggccctggacagtgcagagcgggtccacagccattggtggccccggctggtgcctcacggccacttggctctccaacccgagggtggaggtgtcagcggtggcggcggggcaacgcagaacaagaccacataagaactgggaagcgggagaccatctgctcacttggggattcttctacttctcaagcgaatggatcaagctggaaaaggctgagttagtgattggttgggccccctgcctcccggcctcatcccactgggccctaccgtgcccctcatgcccctgtcaccagctccaagagggcacagtgctcccagcagtgacctgcccgggctggcactccctgcctgtggacagctgtgcacacctgcagttaacctgattggaagctctcacttttgcctggctaataacctgagtttattatctccaaatgcagcgtagttggatgggcagcctctgtgctgcctgcccctgccctggcagccccacctggctctgggctgtgaaattaggaaatttggcaaccagagtatttcctttttttgtctacagatcacatgtttctgttccactgatggttttggtggccaatgccacgttgcaagggttctcgtgttgctttcacaccagaagggttgagtgccttgccctcctcaaaagcaagcagttcacggcgttactgactggagccgctgaggggagatttggggtttgagtgagttggcggtttctgagatctttttacaggcttatatctgtaagggaagccgcagtggaaaaacctttaggaaactgattgtgattgattgaaaatatgaggaagaatttttcttgagtacagctgtacctggctaaaaacatacacacacgtatgcagccactgttaccctctcactttgaaacgtccgagtggagatcatatgtaaaccttcaaaacaggtctgaggggacatccctgtctgggaggagagagcgggggctccggttcctgccggttcacctgcacgcgcctccccgtccatctccctcccgctgtcggtccctcctcccgtctgtctccctcccgcctttcctgagctctgcggtggattatttggtttgtggtggattattcaggcatccttgtccggccctttcccgttctcggggcagccgtggttttccatgcgtgaggctctcacgctgccctggcccagtgggtgaggaggcagctgagactctgcctttcctcttcctccatgtcgctggcaacagatgcgtgtccgtgttgccaagggctgagcactgctcagtggacctctattgggggtggtctcagagctgaattttgggtgtgcaaagaggcaaccactgaggttcccctgcagcaggtgacagaacagagagtgtgcggatggggagcgtggaggagcaccggggccgggcatgagggctggccggcttcagcgccctcggtaacaagtcctctttttctttccagaatcattgatcagcgattcgagaaggtttcctactttgtatttggtgatttcaacttccggctggattccaagtccgtcgtggaggtaggcgctggcttccctcccgccctggtctcatgccttgctctgtgttgaggaaaacagtggaaggagcgtggccccttactggcactttcaatgccatccgcctcccgggatgcactttttaaggcaaaacctttcaatgaagaagcatgttttgctgtcggcagagggatccgtgttggaatccggggtgcgcgggccctcaaggttgccccggatggcgggtgacagtgctgtggggctttgccctgtggcttccgccgtcggcacacaaggagctgctggagtgccgtcacagcgccaccccctcgatgcccacagagctgcagcctctgcagagtgtcagctccttcacactgtccaacttgatctcagcgattttttgtcataacacgtagaaactgtcagagcccgttttaaacattgtgcttttctgtctgcaaagtcattattccgtgagttaacgagtcgtcacccccgcctgggaactcaggggtcccgggtgctcctgggtgtgggaactcaggggtccagggtgctcctgggtgtgctttcgggctggccggggaccagcagcttgggcgccgaggtgccaccgacaggaagtgggcctctaggctcagtgcaagggccgatgtttctctgtggtccagtccacgctggctgtgggtcctccctcccagttttcatgacttgggattccacttcccgggcagctgtgaagaggggggtgtgggaaatggtggagcacctgttgcccacccgccctggccctgctgccctcaccctcagcctccctggtggcccctccaggtgctgggcatgagctgacagcccacagcggggccacagtaagttggatggggccacggtgagtcagatggggacacggtaagtcggatggggacacggtgagtcagatggggacatggtgagttggatggggacacagtgagttggatgggaacacggtgagtcgaacggggacatggcggtccccgagactgttatcttcccattttagtctccagttccaaacacccacacgtattcatcttccaacggtggcaggacattgtttctgaaagacagactgagctggctttgatcatcctgggtctcttgtggttggcagaaatgagtgcccctaaaaccctctgttgggttgagctggcagcaccttgtcacaaggccccaccgcatgcctgtgtatcaacatttggccgtgctggtggcattgcctaaacgttcagtggctcctggtcgaggcatcccttcatctggctgtggaggaggaaggcagggcctctgcgtgtggtgggctgaggagcacatggagtttttaaagcacacatcccccagcaggggccccgaagtcctttccatcccgctgctgtgcttcctttctcctcgtagaggctgtcaaatggatcggtctctggcctgccatcccacaggctcggtgagggctcgagggcaggggctgtgcccatccttgctagaatccatgtccccgcgtccgaggctgtgcgggacccgggagcaaggcctgggggccacagaggcggggccctgtcataggctcctcctccacccccgccaagccacagggggctggaagcggcatttccggcaggtctggaacatctctgagtgagctcatttctaacctgttactcgagagccagtgagtccacagtgcacataagtacttcccgctctgactgggaggggccaggatgaaagtcaagaagaacccgcgaaagaccaaagccgatcaatcccgggcgcccagcaattggggaaaggtcagggagcttggaaagggccttttccttctggtagagcaaatgtcacagtaaagggcagctggtcctggccgggtcagagccgtggtgaggcacgcactggagcagccgcgggagcctccctggtgaagggagccagctgctgagcccggtggccgggccgtgtgaccacaaggcgtcgggggcagtgggaagcctgggctccggtgcctgtggggcttgtgtggccgctctggtcttggcaggcgtgggggtcctggacgctgggtcccgtggggcttgtgtggccgctgtggtctcagcaggcgtggggggcctggactccagggcctgtggggcttgcgtggccgctgtggtctcagcaggcgtggggggcctggacgctgggtcctgtggggcgttgggcaactcctatgaaggactgcaaggctttcctttttctgctgagcagaaaaggaagaaagcacctcaccggggtttgcctgtgggtgtggccgtaagaggaggcatggcgggagaacagtgcaggggcctcgggagccggcctgagtctgccacatcttctcctgcatcacctggcctgctcccctggcctccctaagtgccttcacacacagccctcaaccctcatgggtcactgtcagcagtgttttttgatcaccaagatcagtcctatttcttaaagagttcctctcacacaggcagtcgcagcacggcagctcctgcccaggtctagatggccctggtgccctggaccccgccagggagggtgggtgcagagcaggaactgcctcccgggcctcagtgggctctccggaccttccagtttcaggtctgggacctgcctgagttttacccaggaagaagcaagaccatgctcgcccccacctgtaccccgtcctccgtgttcgtgttaggctgtcgctaaaggagccctcgtcccagccctctgcgctgctgaaggggtccacgcagagggccagtgctggggagggcactggcctgaagccagagttcgaagattcccatcaccaataaaccagtgggatcttccacggcagccttcatgcttaactttaaacatcaaactacagaggacgggaattctaatggctgtgcttaaggggctgtttactttgtgaactggtgataaacagttctccagaaactgccactttctcctgagagtcagtaaagagcttcagcaacctccaggcagctgctcgagcggctggtggagcactccagggcgagtgagcacctgtgtctgagagccgcccacaccaccataagcctcaccagctcccgtccttcaggaattgagtcgtcactgttttttatcactttcccatccacagtaattggaacagacatggagttacttgaaatgctgtttttcctctcagttcccccacagtagctggttttaaatggagtccagcagcctgggtccacctgccctgtcctcagcccctgcggggccctccccaccacctcctggtcttccctcagcccctctgccctggaccggccaggcccctttctgggctccacggggtgcatcattgccacccatctgcctccgcccccatcacgctggtgtcctgcttgccggggccacgtgggcgagtcgggtgacagacccagtgcagccgggtgggctggtggacgtgctggccggggctgcgtgggcagcgcgggagggggcgccatctgctgcaggacagttcacgtctgtccctcacgccctgtctgcaggctcctcggccgctctgcagccccacccactcagctctgtggagaggtgtcctgggtgtaggaagagcagctcctgcgtgcagcttgttaagacagcgggtgtggggcttgcctggccatcgaagcgtcagaggtgactataagtcaggaagggaaagaaaactgcggtcttcctggaacctcctctgcatgccccaagtggatttctcaaaggaacagtaagcaggaacgtggcagagctcctgcgggcctggctgacccaggtggcgtcttgaagtcccagccgcgttggcgtgtcctgctgtgagcctgaccgcaagctgcctcccctctgcccctgcagcggctgccaggacatgaggctaacaagcaccgagggcagcccaggaacccgatttttcacttcatttcattttaattcagatctgataattcagatctgatagagccgcgtggctattccatgggacagtacagaccaggtgactttcaaccagtgcaggggctaccacgggggaggaacattcccgtggacttgctgtccagccagcttgggctcagctgctccccagtgcatccctgttctcggaaccacagccctgaggtgggccctgggtggggtctccacgctgcctggcagacgtggcggtcattcacatgggatggcgtggtcagccctgcacaatcccagggaagagtcaggcctgggttccccccggtgagaggtcagagaacagagaaggcggccctggaggtgaccgcacccctcccgcatatcaggcacccctcctgcgtatcaggtgtccctcctgcgcatcaggcgccccctcccacttaccaggcatccctgggagtgactgcgtgcctcctgcatatcagatgcccctgggagtcactgcgtccctgccctgtatcagacgcccctggaagtgactgcgtccctcctgcgtatcagacgcccctgggagtgaccgcgtccctgccccatatcaggcggccctgggagtgaccgcatccctcctgcgtatcagacgaccctgggagtgaccgcacccctgcctcgtatcagacgcaggtgttttcagcagcaggttttcttcgctggtgccgtttgttggtgtcagacatgaggaggggaccaaggaagggcacgcaggaggtggtggctgagcctccgttgcatctgctgggagtgggggctctccagccccgcgatcagcttgggagggagctggtctctggtgagggtttcccccagtgagggtttcctccagtgcgggtttcctccagtgcagaactcagtgttcacacgaatcggcagaaggaaagccgcatgtgctctgtggttatcaccgaggcatgcccagggcgttcgtgggaaatccaggttctgtctgcaaaggtcccttctaaatggcaccagaattggacaccatgtcttcaacagacgtagatgccacccaggggagcccctgtctaaatggcaccagaattggacaccatgtccccaacagacgtagatgccacccaggggagcccccggcaccccaggcagtggcaatgcagattcctgggagcagggaggcctccacccaccacggctcattcacacgcccggccaccctggtctctgggctctaggatgctgcccgcgacagcagctgcccatgcagttaccaggccctggcttataatgccctcatgctggacagacgtgggtcttactgttctgcgctgtttgtctgccatttgcaaaggaatgggaagaaaaatgaatagttttaaactggattgtttactcagcaagtgtctaagatccttgcattagtgtttggagggttttcctgcccacgtggctctttaagactgtggatacatagctgttcatttgacaagtctttcgttacattttgcacacagtttactatgtaagtaaagcgagcctagtggaaaatagggaaaatgatgtgtagtgtagagttcttgtaggactgttcagtcaagggagggccacacctctggaataaggaccgcttttccctcctggcatcatcaacacagtcgtcagctgtgtgtcaaattccacagctcactgaagctaagtgcttggtgcagggactggcccgaagctgagcacctggatcccatggccgcagggatttcctgagggctgggggccgtgaggagtcacaggaccctggaaccgaccacggggaggaccctgaggcccagggcaggggcggtatccccagggtcacctgcggcccctcagtgctgcgtggcacctccacgtggccatgtcgcttcctgtgggccgcagacacgtgcaggctctccggagggtcacggcctgtcttctgtttgctcatctgttgacgtggaatgtgcgtgccaggtggatccctcccgcgcagagtctcctgtctccgtgtggggagattcctgcggcagtggctcagaggaccacaggctgggtggcttacacagcagaagtttattctctcacagtcctggaacctggacatccaaaatcaaggtgtcctagcgccacgctgctcctggaggctccaggggggacccctccttgcctcacccagccacaggtggcccagatggccctggctcatggccgcatcacctccgtctgcgcctccatcctcatgtggccttttcttgcaaggacatgagtccatggacttagggcccaccccacccaggatgtctcatcccgagatcttaactagttacacctgcaaggccccatttccaaacaaggccccaattctgaggctctgggtgaacatgaatctgggggcacaccgtacagcccaggacagcaggcagcgccggagtgactgtctcctgccacgtggtccactgaacactagcacagaaaacgtttctttgaaagccctacctaaaaataaatctcactgaaaaatgaccagatttatttgttggtggtgattaatttcagctgcattaattaaggtgccaattaggtagattattgaattttaaaataccatccaagcccctcttatggaaaatcaaaatctgctagttggcatggcatggtttttaaaaaaggtttctgactgtaaaacatttcgtagaaattttgtggaaaccaaagaaaattctgcacgattttcttttgaggctgacttggaccaaggaattgagggcaggtgtttggggacccctcataccggcaccagatcaggctgtgctgaacgctgatgccggcctccctctgcgtgtgaacggggtgatattggcctccctccgtgtgtgaacaagctgatgccggcctctgcacctgaacaggctgatttcagcctctgcgcgtgaacaagcttgatctccacttggccctgtggcacgtccctgttgcagtttccttccacatgaagctttttgatgaagaactgacaggagtgcctgggagctccttagcacacacatcctgggctctcccggacctgcgagtctcctgggagctcctcagcacacagatcctgtgagtcaggcccagggcccaggcagcgtctcctcacgtctgcctggcaccaggctcagtgcagctggtgaaccggggctgcgcaggtacctctggtcgggattcaggctcggtccacgccacccgcagtgccatgcccgtgcagcctccagggatgcatcgctgcaggcgcacctgagatgccagctatgctctcgtgtgacgcagaagcatcacctctgggctggactgtcatggcaggaccacacccggcagtggccaccgtcactgcccactgatctcggtgctccctgaggctgtgcgcttctccttcctcagatgaaaagtggacgaggaatccctgtggtccagggcctcattttcctcgtacagctttcatttttcgcactgtggtccagcctccagtgtctttgcagctgggaagtatcaggaggaattggagcgtgcagcagctcagcatggcctgggcagagtgcggattcgcagcgtttccagctgctcagctgagcaggttctttttcacacaggcctgtggatggctgaggttctgggtgggtgagtgtcccactgttggctgccttgtgggcagccccattggtccagcaagtgtgtcctgtgcgtttgctatgtgggcccagcaccaggatgagggtaccgcctgccctcaagaccatggccttgggcaccaggagtgcccggggcagtgggtttgcctggcggctgcctcccccacctctcttcagttctccccctgcctgggagtgatttcccaccgaagtgtctgtgcacatctctctgccttcctagaagcatctgcattttaaaggagagggagtgtcggagtcaaaggccggcaggagtgtcttgcagggtcctcggatggagctagcttcggggctgaatggagtgggttcagtccttgagatgggctctgcccttcctcttggcagagcagctgtgtggtgagcccctcagagaaggccacacagaggcgggcagggcctcccagagggcttagaagtgttgtctgctccccagccgtgtggagcaggtgcatctcgagcacctgtccttccttcccctgagcctttctgtcaaacagcagcatgggttagagtgagaccctgtgggctccatgcaggctagtcctccccaccctctgcaaccccccgtgtggagataccacattcagaggccacgttggtacctgcagtctggctccttgggagccggaaaaggccacacccagcctccaccctgggtttgtggggagatctgtgccctcctctggggtggttttcagattgcccaggatcagagtaagcatacgcggttctgaaggtttgtggacagtgacacagtcgtgcatagccagagcgcatcaggaagccgtgtttatcacagtgcagagcgtcttgcctgatggagtgttctgggaatgctggaggctgggggcaggcggtgcccggtggcacgggcgccctggggcggtgttggtacgaagggacacgtgagtgtaatggtctttcagaaaccacggctggcctggctttggtttcactgctgagctcccacccacagcagcccatccttgccccctcggtcctgggctggtggggtcatcctcttgctctcactgccgaccgcgttcctctgcctgctcacagcgcctccttggtgccctcagtggcaggcttgctggaaagactcatcagaggttaattaaatccatctccacagcaatgggaggccgggcagagccgggctggcagcagcagattaaatacagggttgtttgccctgccgagagttcaggggcagggtgtctgggaggacgaccagcttggtggccctggaggctctcagaccccgaggtggagacctgcttgtgatttttggtggcaggagggttgtagggattggatccgggagtcctgccctgccccacaccagtctgtgaaagaggctctgtgtgcaaagcgaagagactgtcccccaggaatgcgcagcctcctgtgtttcagatgcagattaatgcagacttgctcacagagcagaactgaaaagatactggagtcagatctggcaccacggaagctgtaattacaacccaccacatgaaacacgccagtcgtgtgccatctgagagggccgtgcgtcctcacacgagtcagtgatgcagcctgcggctccagctgctgctgggatgttcagagggtgtgtttcctgcctcgcgcggtggcaactggcagctggggcgctcagctggccgtggtgacaaagagtgacagcagtgccaggcgcacccgtctccacgcggcccgaccgcacaccacacctgccgtccatcacgtctgacagtgacggtgatggatgcgtctttggaggctggtggccatttttaacaaccagttaccaatcactgacaggtacatgctcaggtgccagctgggcctgcaggggaatggccgttgggggcgttgacatccagaaggagccgtcctcggagaggggctgacgtcgcaaggagacaccccgagagccgggcttcccaaaacacggctctcaatgggcaccagggaggataccaccactgcccgcgaggcaggatcccagcacctgcctcaaaggctgtgtctgccgttcagtggagaccatggccggcaagagcagccaaggccaggctgcccagcagcataagcccaggcccagacctcagacattcctggcgcccaggcgtccttccttctagtgtgcactgcgtcctgggaggaggagcagctgtcagccagtaggtaacatcgcacctggtcatggccccccacagccccacagactcctgagacccgctggctgctccggccccagccaggctccaggtgaagttgtgacctcatctggttaccggctgccttgttgagcccctctgccccctgatccctcagccgtgggcacagtgggcgccgtgaggctgtgggcaggagaggccaggtccctgtgtccactggcagctcccatcaggcgtgacagacagggatgactgtgcagctgtcgctagccctgtgtatgggcaggcctgagctcctaaaaactgagagcatggcggctgactcctcagtctgacgatgttcctgcatcggctgcagtcggcgcagccctccaaagccctgcaccattcaggatttggcccatcccacagccatgagcggactcgatgtggcaacatgggcacagtgtgtgtccagagggcaggtggcagggacggtcccttctaactcccacagaccccagaaagcctggctcagagtgacactcctgtagagcctcagcaccgtctccagagcagcatggatggaaagatgcacacagccccatcctcctgctgccgtgggttaatgttagcgcagccccgtcctctgctgccgtgggttaatgttagcgcagccctgtcctcctactgccgtggactaatgttagtcatcgtcaagttctcatcttacctggggacccagtgtgtagacagaccttgtgcagacccagtggggcactgccctcgccacgtgcccagcgtgctctggatggtgaggcaggccagtggcagcctctctgccctccctgccagctcctcagccacagggacgcccttccctgagggtggaggtcagggcggtgagggcctgcagagggcacgtgagctaagccgtgctgctcggttcactcacttgttattctagagtcttggtgtaaaatagcaatggcaacaacagaagcactgatttaaatcattaaatttattttttaatttttctgtttagaaagagattttatttggtctgtttctatatagggcctatgacatcaactgaaaataaaataaaatgttatacttaattatagtgatgacattaggcttcgtatttaggggattttttctaggaagttcactttgcaaatattacccaatattttcaactggtatattgatgccaagaatcttctcattttatagaaaaagaagacaaaaaacaaaagacgcttggcattttctctggtctatgctgggactctgttcgaggaactgttttttggactcactcctaaatgattcataatccgtagtgtgttcactaatctttaatgcacttttctatattttttatgagctcatactttatttaaaaattcctctgactgcccttggtttaaaagaaacccatgggaaaggtagggcacagagcaggtctctcgtgccaaggcagggggttgctggagaccccggacactgtgtagcctcattcgtcctcctccttcacacatcgcacccggctcccttactagcaatcagtggctctgacaagcatacaggggaccctgggacgagggctgagctctgtgtcctgcgtccccctccctttgccacatccccctccccacgtccagccgtgccagtggaaggctggggatgtccgggaggagccacccagaggcacagcaggtgcttctgccgccgggcagggccagtcctgtggagccacccctgggcccagcagagggtgcccggcatggtgctagacacagcctgagaaagagacccgccgccttcttcccagaaagtctgttgagctctagctggcgtgagagcaagtgggcgccactcccattccatgcgcgctgtgtccgagcctgccaggctgctggagtccgggagcaaccttgggagaggacatgaaagagtctttatagcatgttgttgttctgggtggccgttgacaatgaacacagagaggagggaggccactcggatgctgacgccaacatctccccatgacagtgcctttcactggctgcatttctgcaccccataagcttgggatgcagggccttgtgcctggccctggggctcgcggtgaggtctgtgctccagggcctcacggtgggcacttttgtcaagtgatagggtcccccttcgggtctagggttcaccaggaagaccgttgagaagatggagctaaccagaagggctttctcttgggaagtcaaagtaagggaggccggcgaagtgtctgagggcccgccccgcagccctcccagcaaaccctgccccacagccctcccagcaagccaggctctcagctcctcagattccatctgggatggtcattctctgtgttcggtgcccactctggtcctaaaaagctaggaaattggcaccatggcacactttacagaacgccgttcctggcttcactgggggctgagcatgggcacgtgcccccgaggaagggtccttggtgcctgccaccctggcctcccggcctcaccacacatttcccacgccaagtctggccggggtccctctgccaagctcaggcccagcccctggagaagcctgtgtgaggcccgtggtgggggcgtgccgacagaaggcagcgggaaggtggtttactcatccttaccctgcacctgctacacccccagcctgtcgagcctggagggcacagctgttgccctgtgggcctgtgtgctaataggtcctagtagccaccagcatacttgggggtggtggctatagtgccagccccctgatctcagccactcccagagggggacgcagcgctctctggcctttgctgccctccttgccctgggagccgggtgagtcgcactctcgcttccaagaagctgcacacgtgtgtgccataggaaaggagtctggagcctccgggagttaatttgagatgacgtgtgctgtttccatcaaagatcgtcaggcttgggtgtagtgcttgtgaggccctcgccatgccccctgccaggacccaggggcctcagcagaggcgtcttctagggtctgaggaccttgtctccaccctgtgtgtccgttggcccgtgtatgtttgatgagcactgacgttcgggggtgccgcctgtgtccaccccaacgggatgccagaggactccagaggtgaggcttccttggcactttccgtggcctccccaggacgaagcaggttttaaagacaggacttgcacgttggggccgcctgtgaagcgattggctggttgtcctcctttcccactccacggcaatgtctaagatctgcaccagcgtccataatgtgagttaccaaggaatggctaaccccacgggaccagtaatgcttctccaggtggatatccagaggactggggcgtttgtcagaacttagcgtttgaattatctctgcctgtttgcagtgacctaatagtaaacctggaactttgcgtgctggtttgtcagtaggctccatagttttctgaactgtaacggaattaccccctcgattctgagcagtggtccggaccctcaggcacgttcagggcaggagcggtgggagcctcttagtgaattctcctttcacagcgaaagcattacgttggtgtagtggcgcggcatccgggagcacagatttatattcacgttcaccatgactagaagaattatttgtagcatagaaaatgtttatcccctggagtcagttctgttttctagagtcattcaaaaactgaagccgtaatgatttcctattaactcgttttaaggaaaacccatgtaaagtactcgggccttttgttgtgaaccatattttagaaatccttttctacttcctcctttcatccctgctgctagagagtggctacgtggaacttctgtgtataacccttctttatttctagacatgtttctggttaaaatttaaccaaaaactacaggataataaagaaggatgggacttggcaagtttcttcctgccgtgcctttggtcagttttcccagtgagagccactcgcagggtccacatcgttcacccccagcattcaccacccaagggtcaggcttctctgacgtcacagtgatttcctggaggaggaggagagaaaccctaagagttcacctacaaagaaaggggaaggccagggacagtgcctcacacctgccttcccagcactgtgggaggctgaggcaggaggatcattgagcccaggaattcaagaccagcctgggcaacatagggagtccccgtctctacagaaaataagaaagtaaaattagccaggcattgtggggcacgcctgtagtcccagatactcaggaggctgaggcgggaggattgcttgagcccggaggtcgaggctgcagtgagccagccatgatcacatcactgcactccatcctggccaacagaggaggaccctgtctcaaaaacctaaaaatagagataaataaaaaaagggacaccgcctgtcttgggttgacagcatgagatgggctggccagatctccgcagcctaacagtgggcagctccgtgtctgtgggtcacaagtggttggtctcagtctggttcctgctggacaaacactgcaggttcacaccacgggaacttctcggcatctgtgccaggaaagttagagcttcctcatccttggaaccccagcctgcattgcacccagaagaggatacccccgaatgaagctggaggctgctgtccactccacagaaccctggccctcgtcacacccagaagaggatgccccagaatgaaggtggaggctgctgtccactctgcagaaccccggccctcgtcacacccagaacaggataccccggaatgaaggtggacgttggtatccgcgtccgcttgcttttctcaatagccaatgtaaactgaggtggacgtcagtatctgtgtccgcttgctttactcaatagccgacgtaaactgaggtggacgtcagtgtccgcgtccgcttgctttactcaatagccgacgtaaactgaggtggacgttggcgtccgcgtctgcttgctttactccatagctgatataaactgcagctggctgcagcacccacgaatggcttctttccgagatgtggccgtcctctgcagaaaggatgcatacttacagagaaggcgctcactcctgagggagagcaaaggccaggtcagagctgtgtgggacaggaggtgtcctcacgagtctcctggagaggagcctgctcccagaggccaatcagcaccgggtcctacagccctgaggggcggttgctctgtgaacttactaccagatagagctcatgcgccatgagccacgctgcatcagatagggccgaggagagatggcgaagtgctcctcataggagcctgttctgttcctgatggatgaatccaggtgagtcccgtgtgaacacagagctcagagtcccaccccaagaacacactctgtgttccccttgatgcagccccgacctgggccagcacgcgcagccccgccctgcaggaggaagccttcgcacagtggcaccagctctcagaggcgacaccacgccttgtcctgagcagagaggggcgctcccagctttgtcctgagcagagagggtgcccaccgcctgtggaagtcagccccaggtctgagcgagagggccacccccagcttcactcgctggccgttggtctcaggtcctgcctgccatccccaggtggaaggcggttgtatctagtccggcgcccagtcaggctgtgtccagccagagcttcccctgcggggttttgctgttttagtcattgctgttcttcagggaagtcttggagacgggcacagctttccataaattacagccccgtgaaacaaaaagtgcctcccgatgagttcggaccgtgagggacacccagctccgatgcttccttcccggggtctggaatccctggtgaaccggggcccttggtagtcaagaaacctgtcattgaaattcatgatgccggtttggttctctttgccgagatttatcattgacaggcatcctgcgtcctttggccctttatttaaccgctgaaggcattgtttttaagaccatttcttttagaagagtttcttttcagatgttcctacgaacatctgtttgtggctgaaattcgacccagccggcctgcgcctgccccgcgccccctttgtccccggccattgtttctgatttcatgctatcagaggtctgcgtgtttttctgcatgaagttgtcagcaggataaaagctcaggagcagggtcacgttgagaggggagggcatgaaaaattggtaaaatgtgtcttcaaggccacccaccagtgctgcactcagccccagcagggactgggcccgggagtgagggcagcccacccaccagcgctgcactcagccccagcagggaccgggcccgggagtgagggcagcccacccaccagcgctgcactcagccccagcagggaccgggcccgggagtgagggcagcccacccaccagcgctgcactcagccccagcagggaccgggcccgggagtgagggcgagcccacccaccagcgctgcactcagccccagcagggaccaggcccgggagtgagggcgagcccacccaccagcgctgcactcagccccagcagggaccaggcctgggagtgagggcgagccccttgcgcgaaccctggagggccggaccctaaccctggggctgtgggctctgcccctccctccattcattcatttgtcccgtgagtatcaattggatgtctgcaaagtgccagaggcagtttgcttccgaatcagcactttcttcaagactggactcactcctcgtcacgtgtggggaggaaacttctgaatcactgaagtcagtggctgagttcacaccaccccagccagcccacagcggtcacacccttgctaagcttgctgacgggcagcctcactggagcgcagacgttaccctcccaggaaacctgtgatgaggactggggtgcacacgtgtgctgaggacaccctccaaggccggccccggggctcagacaggcaggctggggccacatctgagcctcctggttttagtgcattcactctggcgcagacagaccatggctgagcgtgtggtcccgaattccatccttggaacagaggaagtttttgttatgagaaagaactccagccacagcggatttgcacctgcaggtctgtgtcttgcgacacttaagggccaggctggacgggcccccacagaggtggaggagtggccggctctggccaagctgccagacaccaccagggaaacaggtgcacccacagagcttctgtgcctgctgaggggctgggagtcgtagcctcaaggagcaggctcattttgttgctttctgctttaaggtggtttttcttctggttggatgagaaaagttagttgagccccccacggattgactcagcagctgagtatgtagaaactggcctggtcctggggccagcatgtgagccatcccccaccacccacaggcctcccaggaggccctgctcccgcagcagagcggccgctgtcaccgaggcaatggccagatcaggaattccaggacccccgggagggtgggacactgcggctccaccggtccctgtgtctatggaatcggtgtcagcggacatcccgttcatggtgggatatgcccgtaggtgtcgggcagatgggggagtttcaataccggctcctttagggggtctcagtttggaggaaaaaagccttatttccttgatgatggtttcattccttaagaacgcactagaatctgccccttagtagctgcctgtggtgtttctagattcgggggcaacgttggctttgtggttcgtttttattttatttaactgtgaacgcccttttactccctgcattgaggtgagacagaggacacggctctcaaggagaggaagaagttgttgggattcccaggcttcatgaggccgggctgtccctgagcctgaggcgacctgcagggctgactgatttctatccactgaggaaggttaggattcaacctcagcctcactttgtgcagccgccatgttagacatgccgccacagaccacggcaccgttgtccctcccgaaagtgctgtcctgggcccggcggtgcagcccctggcagcttgcgaggcccgggctgcccgcctctcccgtggcacaggcttggggacagggtgtgcccgagccagtggctggctcaggaggccacagaggtgcatttgcctctgctccaggcgagcttgggcggttctgggagggcctggggacacagggtgacgtggtgggagggcgctatggcctgtcagcctttgatcttggggcaggtggttctgcctgcctgccacagaggacggggtcctccatcccctcgcgagctcctggaggccacgatgctcctggggacacctcccctttgggaaggtgagggctggggctgtccctgttgccaggctctggccctaggaaggaggtttgtggccccagtgactaacggattcccttgtctgcctgggagtgtgttgaccaccagggagtaaccagggaactggactctccgtgtggcaggaggggcatctcccagccttcgagcctgattgcttttccagtgcctgagctgcacccctgggatcccagctttcccttcccgagtccgggcagcatctgtgctgggccctgctgggaccttcctcctcatgtgaggcatgtcacggctggcactggccccagcccgggcctcgggtgtggtgggcccacagtgtgtcagaccctgggtgtggtgggcctcgggcgtggtggcctcgggtgtggtggccctgggcatggtgggcttcaggcatggtggcctcgggtgtggtgggcccaggcgtggtgggcttcgggcgtggtgggcctcagctgtggtggccttgggtatggtgggcccgggcatggtgggcttctggcgtggtggcctcgggtgtggtggccctgggtatggtgggcctgggcatggtgggcccggccatggtggcctcgggtgtggtgggcccgggtgtggtggcccccgaggaggagtgtgtcctggagaacaggcgggtgcgtgagagctcccagctcagccacaagagcaacacatgctgcccacccagcctcgcctaccctgcctaccctgagacgccttggcaggacctagaagccaagcctggggtagggcctcggcgttgcctgcacgtgtgcccagatggcttcttcggagccctgagtgggcccccgaggctgtgtgtccacttggcccaggcagggcgctctggacacctggtgattccaggtagagagtggagcccaggcgcctgctggctgtgcgtgcggtgcctggaggctacagccagcgaggattcatttcagagagtacagaacaactttttgtttttataaaccagctcttgaaggttgcatttaaaaacttgggctgacagggtctgagaggatgtgtttgcctttagtagagttttggattttgtggcagagtgtccgggacagttgagggggtgatgggacagattcagctcccaacgtgagaccaactgcacaggtgcacattggggcgactctgcctgccatgcagctccgtgcacatccgaatgactgcgttatttccttgcacagaaaacagcctttctcctgggctgacacctgtgccctgggcctgtggacgccctgtccaggcagcatgcctccttggttatccaaacagtaagaagaaatgcaggaacttcgtgatccacacgcgtgtggatgaccctggcacacagcgttcccgttaaattctaagtgtggataagacggcacaccggaccactctttccagagcctctccttgcggctgctaataatgaaatacatcttagatggctttttaaacatagcatttagggtatttgtttctcctttcaaaagagaagaatcccttcccaaagtaggcgagccggaaaggcccagcctggccactttccgcatgagtggccacgactttgctggattgaaaggcaaagggaacaggccagctttggccccttcagcctggcctgatcactcctttacagcctgtgaatgaggcagctctggggaggggtttggggtggccggccccttcctgggctctggggtccatcagatgtttgtcctttgggagcctgcctgaagtgctgagataaagcagtttttaaacagtttcccgcagatgccttttgggagacagagccgtgaatttcctgagccgcgtcctgggatggctacaatggccgtctgcctgccaagccttctcccattcagggaaagcagcttaagccacttaagcccattagcatctggatggggccggacctccttgggacacaggggtgggcagggtggccccgctgtgtggctgtttgggtgcttgttctaatcctcacgctgtttgaaggctccagactgatttgtgacacatgagtccaaaagccactttggggggcttgaccccatcagccggtctgtgctcggaatgtcaatggcctgccctggagtgtgctttggggatagcgggtggccgcctcctggcccaggctgagacactgcacaccagccaccaggaggtagacgctgcatcttggcaagaggcgggtcgggctgccgaagggctccagagttcctctcagttcctgctgagcgcatgcccggaacctgcacaggaaggccgggcaccggcccaggggtgtcctcctgagccctgtctccgagccccggccagcgcccggggcaccgaggtgctcctcagcagcaccagctcccaagggccctttcagggagaaatttttaaagccaaagttacttttggtgcagtcatcattttataaaacaaaaatcatatattattttcttaaaaaaacagatttataggccaggtgcagctgctcacacatgtaatcctagcactttgggaggctgaaatgggacaatcgcttgagcccagaggttcacggccaacctgggcaacatcatgagaccctgtctctacaaaaatttagaaaattagctgggcatggtggtgcattacctacagtcccagctactcgaggggctgaggtgggagaatcacttgagcccaggaggtcaaggttaaaacgagccttgatcacgccactgcgctctggcctggatgacagatcaagaccctatctgcaaaaaaattttttttattaaaaacaagctggattgaggtataatttacacacaagctataatccaattctagactctctctccatataatccagttctagactatccctccagcccccgccccagtcagttccctcccggcccccgcagtctccttgctgcctctgtctctccgacttcgccatgtctgggtattttgtgtaaatggaatctacagtctgtggccttttgtgtaaggcagcagctgtgccctcctccacccacaccagcgatgcagaaacgccggtgcctctgcccgccatgagcacgggccctcgctgtccacacagagctttgatttctctcagatgtgggtctcacacttcccttgttcggtgaggttctaggcattcttgttttcatgacttctgccaagctcggagagctcagtgcccacaaggcccctgtgtcggggccaggggctccccgtggccagtccacccaggtaggggtctccagctctcttacctttagggactgaccctcagtgaccattccctgcattgtactgaggttaagacgagaagaattttcaaaacaggcctcaatgtaatccttcgcggtgatctgtgccggctgtccgccagccaggaccgtgcctcctggagcagctcagccatgcagtgtgggagagagatcggcactcactcagcctccctctcctctgctgcccagatgactgccccttcccgtagctggtcaggccagtgagcatccacaggcaccagaggccgcaaccctgaccctgcagcactgctgccccagcccctctccttggtcctcctggtcggtgtgatcgctgggaccctggcgggagcctgagttgttcttgggtcctgtccacctgcctctgggcccctgcccaccccagcctgcgccccagggactggtttgagcctgttaacaccacaaagcaggcgtgtgacctcagccatccctcccacgtcagcttcacccagatgagcctgttgagacggttcccggtcaagccgcctgcagcccttgcccgttgtcacagtcgaacagctctcgagggagttcagggacgggagagagcgagcgggaggaggccggccatgtgcccccgcaggcaccctctttgctgttctcagtgctgctgtgccttccgagcctgctggtgtcgcactggcttttgccccaaagcagctctgtgggcggcagcagctccggggtgtcctcacggttgcagccacgctttgttggggagcagccagcctcaggcccttcgcacgtgtgagggtcggctgttgcgggagtggcccctgaccccaggtgcggaaatctgggtgtgacaccagctgctgtctggaaccagccatcctatcccactgactcggggtgtcgggtgacgctgccatgggcaggtgggcccccctgggacttatctccgttgctgtctttctgcagacgctctgcacaaaagccaccatgcagacggtccgggccgccgacaccaatgaagtggtgaagctcatatttcgtgagtcggacaacgaccggaaggtgagcggggcctgtgactgggcaggtgacgcacggggcctgcgcaggactctgcagcttccttcagagccgccctgcctgcccggttcggtgggggctaggggacacgcacaaggctgggggagctcaggtgctcatgggccactctgacttcacaggttatgctccagttagaaaagaaactcttcgactacttcaaccaggaggttttccgagacaacaacggcaccgcggtgagtttgtggtccaatgtggcagctcccccgtcctgggacatccacgcccccaggccttcccattacctctgcttacctgggaccaccctgccttgtccctgccacctccaggactcagttctgagccagtgcaagtcagactgctggggacacatattgggtgcgtccggcaccccgggccaggttgggtggaggctccgtatcactgtcctgtccacgggcagcatgacactcgacccatcagcttcagagatccccccgtgtgcgaggggagacgctggtgctgtggggtggggaggaaagccccttgtctcagagtgaaccggccgggcctcgggcctcactctgaagtgggagactgaagggagcaggttcctcacactcctgtcgctagacttgctgtgtgtgggtctgtgtgtgagcacgtgtgtgtgctctagtgcatgcgtgtgcacatgtgcacgtgagtgcgtatctgcctctgtggggtgggtgtgccgctgtatgtccatgagcacgtgtgtaaacaagtgcgtgtcaatgggaatgtgcggctcaggtcggtccacggagaggtggcccctgccagtgagagacagccccggctgctggacctgctgttggttttgaaatcgtgagtcttcccttcaagggatcagtgtaggcgagcgctgaggggcggcctacacactctctttacaatttttattttttattgtggtctacttttgtcccatttttaatgtatttacaaatgtttatcagcgcaaagaaccaggaatcacgcagcagctggctgggccccatatgcggcctcggccgatttctgtaaacacgcccactgtggcgattccaagccacacgtgatgccgtgtgcaacgagccagcatccaagatctggaaacctcggcatcagttcctagggcgctcccgagccagctatggttcccttggcgctgcgtcagggcaggtggcccctgtcctcaggaagctgtctggggagtggccgggggagaggtgagggagcacaggcgggtagacccaggacactgcagccgcgttcacatcctagcatcctgggccagccaggtgtctgtgtgtcagtttcccctcgtggggtttgggggcttatgggtgagtgcatgcaaagtgcttaggaagagctggggtctctcagtgccagacagaggggcacgcccagcccagcggacgctgccagccccgagtcccaggcccagaacctccactccaggatggcattcgctgcctccccaacggcccccagaccccacgctcctgtcttcttgggaagtcacttctgcctcctgcccctcatcaacccagagcccgaggctcccgtgacgcccacacctccgtggtgcctgggcctcctgtgcccgtccctgtcacctgctgcaggagcccatggtcctttcccccactggggtcgggtcaggccttggtgtcctgtccccacatggccccatcagcctgggcaagcctaaggtttcctccgcttctctccatccaggcaggctgggtttcctcctgcgccatgtgtgggaggcaccctcccctctccttctcaagcctccagggcctggtggggccgcctgtctgtggctcccgctgcccctctctggctctgcctgcgggactctgggctccaggatgcttccagctacaggacactcccgggtggcgcatcccggcctcgtcagtggggagcagggagagcctggggagcacagatgtctgggtggaggcaggtgcccaggaggtgtcttcgtggaggcaggtgcccaggaggtgtcttcgtggaggcgagtgcccaggaggtgtctgggtggaggcaggtgcccaggaggtgtctgggtgcaggcaggtgcccaggaggtgtcttcgtggaggcgagtgcccaggaggtgtctggatggaggcaggtgcccaggaggtgtctgggtggaggcaggtgcccaggaagtgccttcgtggaggcgggtgcccaggaggtctctggatggaggcgggtgcctaggaggtgtctgggtggaggcgggtgcccaggaggtgtctgggtagaggcgggtgcccaggaggcgtctgcgtgaaagggggtgcacaggacgtgtctgggtagaggcgggtgcccaggaggcgtctgggtagaggcaggtgcccaggaagcgtctgcgtgaaggggggtgcccaggaggcgtctgggtggaggcgggtgcccaggaggtgtctgggtggaggcgggtgcccaggaggcgtctgggtggaggcaggtgcccaggagggagacagggctgccgtcgtttggaggaggtgctttcagggtccctagcagagctggctcctcagtgccaggggagcaaagtctccggggaccttgcacagggcatgaaaaagtggagggtcccttggaggaggatgccagggaagcccagggagatggaatgttttggaaggagctaggagacagggaagagggaggctccctcagccacaggtagggtggtggcaggggacagttcccagccggggctgcgtggagtggggtgcggcatggaggggcgtgtgatgtggagggggctgtggcgtggaggggggtgtggcatggagaggggtgcagagtggaaggggtgcagtgtggaggggcgtggcgtggaggaggtgtggcgtggaggggcgtggcgaggaggtgtggcgtggaggggagtggtgaggaggtgtggcatggaggggtgtggcatggagtggggtgtggcatggagtggggtgtggcatggagggacacggggcgtggaggggcacggggcgtggagggggtgcggcatggagggggtgcggcgtggaggcggtgcggcatggaggggtgtgtctagagcatctgggagcaattgtctttcatgtggatccaaagtcctccttttctctcagcattttgacacagagcacgcccctgctgtcggtagccaccataccgtacagtgtttcctacctttagaggaaaattaatctgaatatttgagagaacttttggatttggttctgaatgaaaacacgctgtggggttgaagccacgtgaggcacccggtgtgattgcggaggcctggtgcactgtgtcgatacgtcgggagtcccatgtggaaaggcggcctgagctcaggaggcgccttctgaggctgtttctcatgagaagagccgatgcctcggcgttcctgtcctgctactcagatcctctctgtttggggcctgggacgacggcaccttcgggaacgccccatgggttcctgctgacccgggtgccctcgcacttgcccgaggtgccggcatgccgagtcagttgtgcccagaaattggcagttgtccccatcgacggagggtcaaggtggtcggacggggagcctggggagataatcccatctccacggtccggttaaacacacagcaccgcagccatggagagcaaactctccgtccgcaggatggatgtgcctgcgccggtcgcagccccaagtccattgcatccttcatcaaccgccggtcttgtacccgtctgacagaaatttaattcaggctggctcctgaaaataattattgtattttaagagtagtaatcattggccgggacatgattgaatgtgtccatgcctattgactttttctatgatttatagctttgtttagtcgatattcccatcgaaattgtataattaattataagtgtagctgtcagggctgcaggatggagtgccctggtgaggatttggagagattaaattttcctcggctgtcccagggccgggcttgggagtttccgcagcaccggcctcttggagggaggtgttttctgtgtgtttagcaaccgctgtagccccaggtgcattgattttctgggcctctttcctttatcagcgccagtgtctctgcaggagtggcgtgagcggcggccgggacagctcctgacagatgggcaggatcagccgctgccttgtcattgtccacacggccctgcctgccttcactttgtaatcaagaagaatgtgggagaccatgcgaaattggtgatcatgtttgtgaaaaatctcagagagatacaaattatcaattcaacagcaacgtgcgcagtttctaatcagaaacctctcctgtctggtattttgttccagccgcagcaggggccctcacccacatcattccgggggcaacagcccccatgccagccatgcagggtgaggctccctccgacttctcagaaccagtggctgagcagggacatgccaggaccctcccgccacacaggatccccccgccacctggccgccatggtccctgcgcagccttgcgtttgtatcatggtcgtgtgtacctctgcctgccctgtaggtgggaagacccgtggggtaaagaccgcgtgtttggagtgtctggcacagtgccgacgtgggagcagcacggtgagcccgtgtccaatgaggatggaggcaggcccaggccaggacacctctgtcaggagacagcctcacgagtgagcgatggggattcccagccggactgccctggggttttctctcaggcaccaggctcagggctggtcagtgtgtgggggcgagcacctatgggcctggggcatcacagtggacagaggacagcctggggccctcacccctccacccctggctccagtaccgtttaagcagcttgaaggttcaagttcacttcaaaccacacacgaatttccttttatttttactttgcactgccaaaactgggggccttctaactcagaagacagggtgggaaagtggccttggtccactgagcagtcctgaaacaccaccacccaggcaggatgccggccgaggaatcccattcagtccccatgggaaggagggggcccccagccaccgaaaaccttgggcagccccagcctgctccttcttcctggagttttccagcttccccacaacttgccttggggttgttcctattggagtgtgtgtcagcgtgtgtgcgtggatatgtgtgtgagcaggcatatgcatgtgagcctgtaggagtatgcatgagtgtgcgtgcatatgcatgtgaatgggcaagtgtgtgtataagcaggcatgtgtgcggacgtgtgtgagcaggcatatgcatgtgagcctgtgtgagtatgcgtgtgtgtgatcgtatgcatgtgtgtgatcatatgcgtgtgtgtgatcatatgtgcatatgcatgtgagcaggcaagtgtgtgagctggcgtgtgagcaggtgtgtcagcatgtgtgagcaagcatatgcatatgagcgtgtgtgagcatgtgtgagagcaggcatatgcacatgagcgggtgtgtgcatgtgtgagcaggcgtgtacatgcatgagcaggtgtgagcaggtgtgtgcatgtgagccttcatgagcgtgtgtgtgagcgtgtatgcatatgcatttgagtgggcgagtgtgtgagctgtgtgagcgtgtgtgtgagcagacatgcatatgagtgggagtgtgcgtgagagcaggtgtgagcgagtgtgtgtgagcaggcatatgcatatgagtgggtgtgtgcatgagagcaggtgtgagcgagtgtgtgtgagcaggcatacgcatatgagtgggtgtgtgcatgagagcaggtgtgagcgagtgtgtgagcaggcatatgcatatgagtgggtgtgtgcatgagagcaggtgtgagcgagtgtgtgtgagcaggcatatgcatatgagtgagtgggtgtgtgtgtgtgtgtgagcaggcgtgtgcatgcatgagcgtgagcaggtgtgtgcatgtgagtgggtgtgtgtggggggtggtttgctttttagttagaaagtttaggcagaccctagcggcagccgctgaggcctgagggaggtcctggccacccaggagcaggtgctgaccccagaggaggctccaggggcctgacacggctctgcaggtctctcttggagactgaggaagactggggagtgttcagtggtgacagtgaagccatcccctgcagtccagccatacacgtatccagacacaaacgtttggcacatgtacctggcacacacagccctcagacatatgtccaggcacacctgtgcacacaccaaacagtgtggagtcgcctctgcctgggccccagggaggcatccccagagctgctcatagggaccccatcattgggtggtcagatttgcagctcagaagtaaagatggcaacacactcagaatccgcctggcctggaattcctcggcccggtcaggaattgaagagaaaagcaagtgtggggggggagtgtgtgtgtgtacacatatgtgtgtgcgtgtacatgtgtgcactttgtgtggtgtatgtatgcgtgtacatgtgtgcactcacgtgtgtggtgtgtacgcatgcgtgtgcatgtgcactagtgtgtgtggtgtatgtgtgtatgcatgtgtgcactcgtgtgtggtgtatgcatgtgtgtgtacacgtgtgcactcgtgtgtgtgtatgtgtgcgtgtacttgtatgcacttgtgtgtgtgcgtgtgtgtatacagtcacgtcacataatgtcgtttcagtcaacaacagactacatatgtgactaaggtttgataatctgacgataggactgaaagcttcctctcgctgtgtgatgtaactgttgtgacatcacagcgtggcggcactggtgtgaaggagccgctgcgccgcctgctgtgggagagtctggcacactcagggatgcgcagtgtgtcgtacttcagagcaacaacaaacaactgtgttactggtgtctgcgtttcttctcccacacttcttaccattactgtaatgcactccttctacttaataaaaaaaggtacctgtaaacagcctcaggcaggtccttcaggcaggtccacggagaagaaggcgccgttatcacaggagatgaggctgcatgcgggtggttgcccctgagggcctttccgtgggacgcagaggcggcagagaggaacgtcgatgatcctgaccctgtgcgggcctaggctcatgtctgtgtcgttgtcttcattgttatcaaaaaatgttttaagattttgaaatattaaatataaagaataggcaaaaagtttatagaatatataaacaatattttatacagctatacaatgtgttttaagccaagtactatttgacaaaagagtgaaaaagttgaaaaatgttaaagtttataaagtaaaaaagttacaataagttaaggttaacttattacgagaaaatacatttcagtacattatgttactcttagcgtctcagcgttccgtatttataaagtctgacattctgttactctcagcgctgggcatttctaaagtctgcagtgcacagttgatcccaggccttcccgctcacccccgcccgctcaccagctcaccccgagcccgtcccagccctgccagctcccttcgcgagcggggctccgcagaggtgcacgctttttcttctttagaccttgtttttactgttccctctctacgtttaggtatgttcagatgcgcaggtacttacagtgtgttacgccacctgcggtggtcggtggcctgctgtgcgggtctgcagccctggagccacgggcctcccactgtacagcccaggcgtggagcgtacacgcgctgtgatgtcccacagcgaaatcgcctaagggtgcgtttctcagaccgtatccccgtcgttccgtgacacgtgactgtgtgtgtgcagaacccttgccaaacagcctggaaggatgacttggtggctattgagggctggaccacagcggagcagagaggctggaaagccgagccccacagcccggcaccatggcgtgggtccccggccgaccccacaggccagtgcgatgtcgtgggtccctggctgaccccacagcccagcaccatggcgtgggtgcccggccgaccccacaggccagtgcgatgtcgtgggtccctggctgaccccacaacacagtgccgtggtgtgggtccccggctgaccccacaggccagtgcgatgtcgtgggtccttggctgaccccacagcccagcaccatggcgtgggtgcccggccgaccccacaggccagtgcaatgttgtgggtctctggctgaccccacaacacagtgccgtggtgtgggtccctggctgaccccacaggccagtgtgatgtcgtgggtccttggctgaccccatagcccggcaccatggcgtgggtccccggccgaccccacaggccagtgcgatgttgtgggtccctggctgaccccacacccatagcccggcaccatggcgtgggtccccggccgaccccacaggccagtgcgatgtcgtgggtccctggctgaccccacagcccggcaccatggcgtgggtccccggccgaccccacaggccagtgcgatgttgtgggtccctggctgaccccacacccatagcccggcaccatggcgtgggtccccggccgaccccacaggccagtgcaatgttgtgggtccctggctgaccccacaacacagtgccgtggtgtgggtccttggctgaccccacaggccagtgcgatgtcgtgggtccttggctgaccccacagcccagcaccatggcgtgggtgcccggccgaccccacagcccagtgccatgacctgagtccccagctgaccctatgggccagtgcaatgtcgttgggtccccagctgaccccatgggccagtgcgatgatgtgggtccccagctgacccgacagcacagcaccatggaatgggtccccagctgaccccagctcggctgttttcctattgtcatggactgtcttatctatgggcaggtgctgaggaaggacccccagagctgctgaaaagccttagaccgtcctttgtctcctctcatgaggagcacaaggctgggagctgccatctgtggatgtggcccacgtggggtctcctgtggctgtgggactctcccacggtgtccggcggccctgtctcctgagcgtcgggtttcgtcagttggattcagacccgcgttcctcctgaaaaggatcggaaagctgggtttttaatttttctgccatcacgtttccctgtcaatgcaaatcattggttcagccaacagtgatattgaactctgtttacatttagggcgaggagttgcagagacttttctccccgaaggcggagttctgatttccagagcactgtgcatggtatgcttctgactgaggccctgagtgtgcagcaggtcagcgtggcccaggcctcagtgaggccatgcccgtccacacgctcagagcccccagggaccaacagtgtccttagggggacaggaagtccccaggcccctcagtgccagcttggatgcaccagggaagacccccggggtagtgaggggtcctcagaatcctgatctgggcaaaggtctctccacccacgagtgtacagaggagggtcggggatcttatcccctgaggcgcctcatgccagacagaagctgtggccacactccgtggcttctgcctcaggaacttgcaaagggtgcacaggcctggaatggttcagaaacacctcagcctgggatttccggcttccagaacctgcaccaacaggcgttaggggctgcctggggcttcgctcgctgctgtgctgtggtagccggaggggcccagcatcggaagttccagtaggtggggctccacgtcagggtgtgtccccaggcacccccattcctgctaacatcgaagctctcgggaagggaggtggtggggggctctcgggggtccggctacagtgaacagtctgtgttctatggcccggcgccctcctcaccctgcaggagccccggccgtaagcatcagtgaccccctcaccctgcaggagccccggccccatgcccacgccagcccatggaggtagccctggcgtcctcagagccccccggccctgttcagagtcccctgggcctgttctccctcttcttgttcacgtgccccttgatgcgcagtcccgtgctcactgtgcccggtgcattcaccaggctggggacactcactcagggctgcggcctcacgacttcggtgctcagccacgcagcaccgtgctcacagaccccacgccgtggaccctggcggccagaggcagggatgacccaccctgggcgatagccacaccgtgcaggaagcccggtgctctgctctctgaagctaaacgaattcatgtcggccaagagctccagctactcgttccctctgctcacatgcccagcctctctgcagcacctgctgcttctaggaggtggagcagccccagcagccccaggccctcaaaggcctacgtggtaaggcacagcccgggcctggctgcagcccagacaggcacagggccagcaccgaggactgggggtgctgaggacttgaggggtgctggtggttgctggaggcagagccagggtcggacgctgtgccgcacgcctgcgaggggcgatggtccttctgggctccagagctccctgagtgctccatgagagctgtgggcccgctgtgagcagagccctcattgcaagaggccatctgtgcccctgcactttggtgctgtccaggactgcgtcccccacagctgtgaaagctctggggtcactgcagaaggttggaggaatgctgatccgggacaacttcattaaggacgtggcatcggagggccccacacagcagagctgtcattctggctcacctgagcgggagctttgctgaggactctcctttcctctgtgcccatctctggtacggggtgactgtggcgcagcgtgtgcttcctcatgacgcccgggcccctctctcccatggcccaggtcaaggcaggaggacgctcggtttcccatctgcacagctgggcctgtccttcctgggcggtcctttgtccactgtcttcctgaggggagtttgaggagaagccccaggtctaactctgtggcagacaggcccaccgccctgcatctcgggacacagcaggcagtgtttccactgtaaacgcggggagagggacccactttcagagaaagaatttggcatctggtgagagcatctcgtttccagggggaatttcagaaagagtttgcatccgcataatataaatacacacttggcaaaagcaaaacacaaagccaggctctttggattcttagactaaaaatgtgctgggaccgccaggcttcgtgccacgtctggttcgacctcgactccctggtgtgctctgcagaggtcatggcgtcttcgggtgccacatgcccgtctctgggtggcacgggcccctgagacttctatgaacttgcatctccagcttttcaagttttactggagtgtcattgaggcagtaacttgatgtgagaaagaaagcaaatgcctagattgtctggagaccacacgctgggaacaggaaaggcactgcagtgcactgtgggggcatgtgttcatttgacagcactctgggtgcctgctctgagccaggccctgctctgggttaacaagacagacagacacatccctgccatggagctctgggggtggcaggggacagcatggtggggaggagcctgggaatagtgtgctcagcaggtgagcagcacctgtgggggaggagcctgggggtgccacgaggaagcttgctgaggatggcatggctggtgggggacagcacggtggggcggagcctgggggtgccatgcggaggcttgctgagaagagccataaacagtcaccctgggtgactccaagctgtgggaggccagtgcggtgcagggacccagtcggtcactttggagggcaggtccacattcattgtcacaactaaaaaaattcccaaaaatcaagacccaccaaagacgatcttacagttgcaaactgtgaaccacgtaaggacacattccacagatagcaagagtccagaaatacaacaaaggcaggacagaccgtcaataatgccaaatcatcgaataattgatacaaattataatattgtaaattattaaaagcatgacagaattagaaacataagtaccacactatgaaaaaaatcccaacagataaaaaaaagtaggactcatagaagtattatcattaaaattaaaagctccagggatgaattaagtgccggagtagacacagctggagaagggattgaggaatgggatggcaggcctggggaatggcccagaatgcagcacagaaacgtggcaggatgggacaggagggtcggggctgggagaggagggaagagcccagcgcttgcgcagtgagggtccacgaggggcacactggagagtcaatggctgggcgttttccagaattatccaagacataaacctcaggaagcatggtgagtcctgagcaggaggaatggaagtaaatccacacacagacatgtcagagtgaaacagcggaacatcaaagacgaagagaatatttttgaagcattgtgggaaaaatgtcctattacataagaatgcaagtggcggcgggtttccagaacaaccacaaaaatacacaccaggagaagtggaggcgttcagtcaaagagctggtggaaaaccccacccacacacttagagttctctcagcagccaagtcagccttcagaacactggccaccataaagacagtacctggcgatggagagacacagccccaccagcaggtcccacagagaaccaggagtagctgagcttctggagcagggtgggatgaagaaggaagaagaacatttgtgtaaagcttaaaaacatgtaggctgaggcgagctgctttttgtggactcatgcatggcggtaatatagaaacatacttggggctgggcacggtagaacacttggggaggccgaggcaggaggattgcttgaggccagtagtctcagacaagccagggcaatgtggcaagaccccgtctctacaaaaaataaagacttagcaggagtggtggcacacgcctgtaattccatctgctcgggaggctgaggcaggagaatcacttgagcccaggaggcagaggttgcagtgagccgagatcacatcactgcactccagcctgggtgacagagggagactctgtttcaataaataaataaataacttaaaaaccatacttgggattcttgaaaggtctgagttacactgggaggaatgagagggtttggtggtgcaggggagatctgatcccctcctgccagtgccttcctgaaatctcgaaacatgttgtatcatagagattcagggaacctgccatcagcattttggtgaaagccacaggatggcagtggctcctttctgactctcagcagatctcatagatgctcctgggcaggccttagggaaatctgggctcctagtctcatagctggtgcctgcagagccaagaaccgcatggcacctagcgctggcagcctccctgctgcctcctcacctccacacctgagaagccagcagggcccacgctggactggggacgctgctgcatctctgatgtggggaagcctcaaactcaagctccagaatgacctagagatgatgcgtgtttataggcctgtgtgtgaatgtatctgagtaaatgcctgcatgcaaagacacacatgcctgcatacacataaacacgtgcctgcatgcacacacacataaacatgtgcctgcatgcaaacacacacatgcctgtgcacacataaacatgcctgcatgcaaacacacacatgcctgtgcacacataaacatgcctgcatgcacacacacatgcctgtgcacacataaacacgtgcctgcatgcaaacacacacatgcctgtgtatgcataaacatgtgcctgcatgcacacacatgcctgcatacaaacacacatgccgttgcacacataaacacatgcctgcatgcaaacacacatgcctgtacacgcataaacacatctgcatgcaaacacacacatgcctgtgcatgcataaacgtgcctgcatgcaaacacatgcctgtgtacacataaacacgcatgtgcagaattgctccagagcccatgcccctactctgcctttgaggaggggcatccgtctcccgaggcctccgctgcatccccaccccatttaggagctgacttggggcccttcccagaggctgtgggtgctggagggagggagttgctccctggaaggggaactggagctgtaccctcttaggaggcaggaggcagtggggctgtgaacgcctgtgctccaggcaggaggcctgggccggtggctcaggtagcagcctggcacagggtaatgactgtgtgcatgaggctgctgattgcccatttcagggataatggacgaggtcacaggaagagctgggatatggtgtggttttgagggagctctagctcaatgccatgccctgcacagctgtggggccatgactaatgaatagcaccagagagggtgtgcatggtgaccgcacaggaacatggccgggccagtcctgcagggttgagagggtgtgtgtggtgacactcaggaacacggtcgggtcagtcctgctgcggtgggagggtgtgcgtggtgacactcagaaacacggtcgggtcagtcctgcaggggtgggagggtgtgtgtggtgacactcaggaacacggtcgggccagtcctgcaggggtgggagggtgtgcatggtgacaggaacacggccgggccagtcctgcaggggtgggagggtgtgcgtggttacactcaggaacacgggccagtcctgcaggggtgggagggtgtgcgtggtgacactcagaaacacggccgggtcagtcctgctgtggtgggagggtgtgtgtggtgacactcaggaacacggtcgggccagtcctgctgcggtgggagggtgtgcgtggtgacactcagaaacacggtcgggccagtcctgcagggttgagagggtgtgtgtggtgacactcagaaacacggccgggtcagtcctgctgtggtgggagggtgtgcgtggtgacactcaggaacacggtcgggccagtcctgcaggggtgggagggtgtgcgtggtgacactcaggaacacggtcgggtcagtcctgctgcggtgggagggtgtgcgtggtgacactcaggaacacggccgggccagtcctgcaggggtgggagggtgtgcgtggtgacactcagaaacacgaccgggtcagtcctgctgcggtgggagggtgtgcgtggtgacactcaggaacatggtcgggccagtcctgcaggggtgggagggtgtgtgtggtgaccgctcagaaacacggtgggccagtcctgcaggtgtgggaggtgatgcccgcctggggcttgttttggaagagtctcagggggcaaggccatttgctgcctcccgtgcatgtgagaatgaacattttgcccccgaactgctgccagaatctcaccagtgtgcaccttggggccattttccctgacctgttctcacaaagctgacattgctcactctgcaggttacttgacactctgggcaggacaggagctgtgttccctctgctgggggagccagcactagggaggagaggccgagaggggctgctactggggctgccacggcagtgcccgaggccatgagtgcttctctggcgtcaccaacagagaaagctttatgggtgggcagagcacatctataacgggcagggcaggtcccactgtctgcagcagaggcaggcgaacaccagagcctgctggcaccacagagctttctggtgacagatgtggcggctctgggaagagcagatgtcacaccgagcatttgagcgtcccagctgcacacagacacacgtgcccccagcgaggaaaaccaatgtgactttattttctgctctttcttttctttagctcttggagtttgacaaggagttgtctgtctttaaggacagactgtatgaactggacatctcgttccctcccaggtatggaacatgctgtttgctggatgaacccggccgggaaggtggcgtctccaccctcccagtctctggtgcatctgcgtgtctgtgtgtgccagtttgtgctgggcatgagtgtgtgcattctgtgtgcatccagagtgtgtgtaccatacctgtgtgtacacgtgtgtgttgtgcatctgtgtgcacaggtgcgtctgtgtgtgaacgtatgcgtctgtgtgtgtgcacatgtgcacgagtgtgtgtgcacgagtgcatctgtgtgtgcacctgtgcatctgtgtgtgcacgtgtgcatctgtgtgtgcacgtgtgtgttcttgtgtgcatagtgtttttgtgtgtgcacatgtatctgtgtgtcctgcacttgtgtgcaaactgcaccttctcctgcccttttcatgacatgaaaaaagcagctgagagtaataagtaattctgttatctttttccaaaaaaggttttttccaatatgcaaaatactttcttatcagacttgctcacgagggacctacggggactgtgtgttatggatctttctggcaatatcggggcctccaaatgcagtgtgtctatgtgggtgtggatgtgtttaaggcatgcgtgtgtgtgcctgggtttgaatgtgcagatgttgcgtgggtgtccgtgtgtgtgcagacctggtgcagatgtgcgtggggcgtgcgtcacacagttgtggatgtgtgtgcataaggtgtgctcgcgtacatggttgcatatgtgagcatgagtgagagcatgagtgagaacatgtgtgacgtgtgtagggctcatgcatgtggctgtgctccacggatgtgtgtgcacatgtgtgtgtgttcacgcgtggagatgtgtgcctgggtgtggatgtttgtgtgcatttttatgcagatttgccagcacagagcagttctcactgttggaagccgcaggggacttccactggcagatgtggactttgcctgtcagctgggagcaagattgggagctggaggtgcggcctcagggagcctgggtgggagctggaggatgcggcctcagggagcttgggtgggcttgggtgggagccggaggtgcggcctcagggagcttgggtgggagttggaggatgtggcctcggagcttgggtgggagctggaggatgcggcctcggagcttgggtgggagctggaggatgcggccttggagcttgggtgggagacagaggatgcggcctcagggagcttgggtgggagctggaggatgcggcctcggagcttgggtgggagctggaggatgcggcctcagggagcttgggtgggagccggaggatgcggcttcagggagcttgggtgggagctggaggatgcggcctcggagcttgggtgggagctggaggatgcggcctcagggagcttgggtgggagccggaggatgcggcttcagggagcttgggtgggagctggaggatgcggcctcggagcttgggtgggagctggaggatgtgtcctcagcttggggacacaggctttcctgaagccagaggcagtgctgaggtctgagccttgaaagtgacggagcactttggtgtccaggggaagtttttggacaggttggaggagcctccagaaggcagtggtggcccaggcctctcgtcctcctcacgagcttcttcctgttctgcaaagacaccgaggctccctgccaggcatgccagccttatcctgtgggaggtgcaggaagcctcaggggatctcgggctcacacccctcttcctggagggctcccccatcccgcttggatctgaagtctgactgctagacacacgggcccccagagagcccctcgcgcccagtggcattccagaaagatccatggaccccgaccctcagcgttcccagggtgcccatgcgcccagtggcattccagaaagatccgtggaccccgaccctctgcattcccagggtgcccacgcgcccagtggcattccagaaagatccgtggaccccaaccctcagcgttcccagggtgcccacgcacccaatggcattccagaaagatccatggaccccaaccctcggcattcccagggtgcccacgcgcccagtggcattccagaaagatccatggatccctgaccctcagtgttcccagggtgcccacgtgcccagtggcatttcagaaagatccgtggaccctgaccctcagcgttcccagggtgcccacgcacccaatggcattccagaaagatccatggaccccaaccctcggcattcccagggtgcccacgtgcccattggcattccagaaagatccatggatccctgaccctcagcgttcccagggtgcccatgtgcccagtggcattccagaaagatctgtggaccccgaccctcagcgttcccagggtgcccacgcgcccagtggcattccagaaagatccgtggaccccgaccctcagcgttcccagggtgcccacgcgcccagttgcattccagaaagatccatggaccccgaccctcagcgttcccaggtgctcacgcgcccagtggcattccagaaagatccatggaccccgaccctcagtgttcccaggtgctcacacaggcctggcttcctcttcggcatttggctgggtgagatcagcttccgctttcccgctgcgtctgccctggcggggggtcccgagtgcctctgcgtgccaggctcgtccacctgccgcctcacactcttccccgtgcagctctgcccctgtcaggacacgttggccttcctgtgctttcctgaaggctgccagggctctgaggccgtgggaaggcgtccttgccacggcctggcccctgaggcctgtgtctgacccagctcctcagaagctgggagccgagccgccatctgtacctgctggtctggcagcgtctccttcctgcggtgactcccggttttcagaatcgtttcatggtttttgctgttgttgtttgagtgaacgcattgcaaaccggccgagcagccaagtacatcttcccatcactgccacagtccccgccctggttttgggcagaggtgagctcaccaccttggagtggttcaaggcaccttatcagcattggtgggcaggaccctcccgcgggcagtagaccctccatggggagagcccgcacctgctgaccctgagaggagacagcattcctagcgcagagctccggatacagccgcacccggggcgttggtgcgtacactggcagagtgacgccaggaaatgtgtcattggcggatggttctgaagaccagcggggtcttctcctgcaaaggtgtttgccactgatcccatggatgaatagaactctgctctgaatgaattgtaactgaatgctgtctgtcattttgccagaaaaggtgctaatatttcagacatttatacaaccctcaatttttgtccttaactaaaagcacggttcttcctagcgccttctttagggacagccacaaaagtgacctgtttgaggcggtcaggagcaggagagtgagcaggcgggaaggaggctggccagaccttgggctgcctctgcctctgcataaggaactctcccgggcgggaccctgagctgtaagatggtgccttcaggccaggacagcacccaggatacagcctcccgaaggcctttcatgccatgtgctatttccatcgggtgtgacgtgttaaagctctacacgtgtgcttagagttactgggggatgagggacccatggtggcagggatgagtcttgcccactctggtctctggaaaccaggcggctatgagtggatgcggggtcaggtggcgtcagcccttagtggtgagcagaggcggcgatgggctttcttcacccagcattggtctgcccggctccccagacgccaaggccctcagggcaggattgtggtgtgcgcctcaacagcagccctgcagcccccaccccgtagctccccccccccaagttcctgatacgtgtggctcccggtacagcccaggctcaggtggcggcgatttggacaccccagtggtagcatggagctgctgcctttttgcgcatcctagctagaagtgaatttctaatttttagtttaactttgagaattaaccgccattaactctaagataaagagatttaagatggctcctcggtggccgctccactggtgtgacagcccgacatttctaggcgttagcatttctcacgaaaccccatgtagaacagggctggcgagggcggcgcctctggaaccagagtcccacctctgccctgacactgcagagttgggcacattgctcacccctcgtggcctcagcgtccccctcaggatgctatcgtctcctctgggcaggctgagccttcaggcccaggcctgcccgacggtacccacccccaggtcagcctctccgcagccagagagccgaacgctcccaagtcaccgcagtgtcgccggccatcgggtggctcctgttgcagcttccggaatgtggggggcactgcgtttcctcgcggaggccgtggtgctgtgcatagtcagccggggtttggctctccctctttgtctgtgtggacgctgagcgtatggaggatgggaattgtcacgtccattgcctgggggctccctgtgtctgtggactccttacatagtgaagagactgcatcattcatttattaagaagaaagccacatgccaccatcgaaatggccccgcagagcctcgctggccgccccggtggcctggccacttccctcttccagctactgaggaccctggagcttttgtctatgtgggttccatctgttggtcatggccatcagtttttaaatatttattagtccgttttaaaaataacacaattacatgtttacataagtaacatttttgtgaaaaaagtacccatgcacggggaggtctccttccgccagggcgtgatctgggagccgcacacacaggtcccgggaaatcccagccacccagggtgtgggagtctcgacgcggcacgtctggcacccagtgcgagcagcaccttcctcagaatatggcagagctcaagggaggggtctctgtggtggggacgccgccagcctctgggaggaatacgttttccaacaccctcgggtctccttgaaagcttaaattttgtcattggcaacaaatagcatccgctgctgctggaagaggcaggctcgtccgcccttctggagaaaatgcctgttagccaccgaggtctaagttaccacagtctgtctgtcaatctttctggcaaaatatggtgtccgtgaaaacgagcagctgctttagctgacgactcagatgcaggcacgctcccctgagagatgagggccatgtcatccctctgggcagaggactccctggaggcctcatctcatcccacccagcccaagaccccatctcccaggcctggggttcaacacaaggaatcatttctcctgcttccctcgtaagtgaaggtagctttttgtttagtgctgagggattgaccctgggagagaccctgcccagcacggcccggcctctgcctggttcccacgccggcgccggcagttttaccaccttgggcagcttttgccacatccgtgcaatgccagctccatgaaatcagtgaatatcaccttagtgtgctcgtcaatgtagatctcccctctcagactgccgcaggggtcccagggacccacagggggccacacgccaactccagaactgcccaaaacttggaagtatccccagtgcccatgaagagtgggacggacactcagcactgacacggaggccccggcagccgccccgcgaagagtgggacagacactcagcactgacacagaggccacggcagccaccccatgaagagtgggacagacactcagcactgacacagaggccacagcagccaccccatgaagagtgggacggacactcagcactgacacggaggcccaggcagccgccccgtgaagagtggggcactcagcactgacacggaggccacagcagccaccccgcgaagagtgggacagacactcagcactgacacagaggccacagcagccacccgatgaagagtgggacggacactcagcactgacacagaggccacggcagccaccccacgaggagtgggacagacactcagcactgacacagaggccacagcagccacccgatgaagagtgggacggacactcagcactgacacagaggccacagcagccacccgatgaagagtgggacggacactcagcactgacacagaggccacggcagccaccccacgaggagtgggacagacactcagcactgacacagaggccacagcagccacccgatgaagagtgggacggacactcagcactgacacagaggccacagcagccacccgatgaagagtgggacggacactcagcactgacacagaggccacggcagccaccccacgaggagtgggacagacactcagcactgacacagaggccacagcagccaccccatgaagagtgggacggacactcagcactgacacggaggccacggcagccaccccacgaggagtgggacagacactcagcactgacacagaggccacggcagccaccccatgaagagtgggacagacactcagcactgacacagaggccacagcagccacccgatgaagagtgggacggacactcagcactgacacagaggccacggcagccaccccacgaggagtgggacagacactcagcactgacacagaggccacggcagccaccccacgaagagtgggacggacactcagcactgacacagaggccacggcagccgccccacgaagagtgggacggacactcagcactgacacggaggccacggcagccgccccacgaagagtgggacggacactcagcactgacacggaggccacggcagccgccccacgaagagtgggacggacactcagcactgacacggaggccacggcagccgccccacgaagagtgggacggacactcagcactgacacggaggccacggcagccgccccacgaagagtgggacggacactcagcactgacacggaggccacggcagccacctgcagcgagccgccgctgcgcacagctccacaagtgagtttaaagccgggttgcacaggtggagaggacgccctgggactccacagggtgctgttactgcaggcggggaatcacctcccaccgccctccccggtggaggcctctgggctgtgggccggcgcagggtgcggtgggctggtgaacacccatgtcccgtgtgcactcagccttgtgtgtgcctcactgtgaagtgaaatttactaaaataaatggaaaagtttagaagttctattgctacccgtcaaaacgtttcaaagtttttatcatacgcagagcaggtccagtgggaaaaaatcactccttcccaaagaaagactgactctcagaggtgggagagggatgttttcattgaacaattactgagcaagatcgagttttagcttctgaaaaacacaaaaatatacgcaacacaggaatgaactgcgcagacaagtccaaccagaggtcgtctctctttaatggacacatatatttttaaattagggattaggaggcccctttcaaactttccgtgggccataatttatgttctcctgtctttagatgtgtatttatagtgtaataattatctagcaaaatgaactctactgcctgcgagctgggtgctcaggagggagcgaggccgcccgtccgcctggtggtcaggaaccctgggtgcctgtggctcatacagactgtgggacctgtgccgagggggaggacagtgagggaacccgtcccacagaagaggcctgccaagggttctggtcacccggagagcttttgtccctcgagatacgggcgaggggagcacccaggacagcctcctgctctgttgcccgggctggagtgcagtggtgatcttgcctcactgcagccccatcttctgggctcaagcgattttcccccctcagcctcccaagtagctgggactacaggtgtgcaccaccacacctggctaacttttttattttgtatagagacaggggtcttactatgttgtccaggctggtcttaaactcctgggctcaagtgatcctcccgcctcagcttctcaaaatgctgggatgacaggcgtgagcccccatgcccagccccccagaccctcttggaagtctgtgccgcttccttctcccgctcggtagcttcagcattgccacagctgtaatcgtttagttctttctctttggttttagggccttctccttttcaggaattccagtggcagctggtgtgtttggaagcgggtgtctgaagccagcattgccagtggtgcctgcaggctgcacgggaaggcagagctttgatgaggtcctgcttgtgacgggggtgtgtcagaaccgttttctctgtagtgtgctgcaccctcctgctccgtgtacacaagagcggcgtggtaattggttaatattttaaccaggcgggagtcagaggaggggctttcaccctgacgcccacctggagaagtgaggctgcgctcctgccgcttcctctgagcacagctcggggagttggcgtgaactgtcgccgttcacttgtggttcagggcggctgagcactgtggcgaagccgtgggcccccacccagcctgccttctggggtcctcccaggcccgttggtctctcctgtgccgtcagccctgccccaagacctcgacatagccgggcttttaagcttgttgtctgcttctcgggcccgtggcgaccctacctacccagcccagcctgctcaggttctaaagctgggccttgtcagcagggccagtcagcctggccacagcaaacaatctgccgtgcagcctacacaggggctgctgcccgcatcctacagggaggagagaggggcagggaggagagaggggcacggaggagagaggggtagggagagacgggcagggaggaggggcagggaggagaggcagggaggaggggcagggaggagagaggggcacggaggagagaggggtagggagagacgggcagggaggaggggcagggaggagagagggacagggaggaggggcagggaggagagaggggcagagaggaggggcagggaggaggggcagggaggagggggggcagggaggagggacggaggagagaggggcaggggggaggggcagggaggagagacaggcagggaggaggggcagggaggaggggcagggaggagagaggggcagggaggagagaggggcagagaggaggggcagggagagagggaggggcagggaggagagggggcagggggaggggcagggggaggggcagtgcctgcagaggctagcacaggagtacgattgttcgccctatcacagccgctcccacgctgtaggcgcaggtgcgcccctgtcctgtgtgcctccccccccacccagcaggtatgctttcagataagcccacatgcctggcactcccacgtcagtcactgctgggcagcgtccaggccccgcgtcctgctgctctgcagcgtggccccgccagcacctcccacctgtgggtacagcggttgtgtgcagtccacactggccttccccagacccagctggaaccagcccctcctgcatttctccctgggtgttgggggccacagggagcacccctggctgtggattaagggtgttgcccccaacagcctggccaggacacctctctcacccaggcttcttcctcctgttgagtcgtctgtgaacactcccagggaagcccttcctggagcagatgggctgaggaagccgctgccactctggcatccctgttctctcttgctcatccccagagcccagtctgtctgagcagcaatgcccatcagaccctgtcccatggacagagggcggctgtgcttcctgccacgccctggcttctctccgtgcccccaggggacgccaggtggcacgggctctccaagctccatggggtgcatgaggagggagaactggttcggttccagcttcctatttagaagtcacctattgtgtgctgtgtgcatgtgtgtccggggggcagtggacgtgtgtgcggatgcaatggacatgtgtccaggggcagtggacgtgtgtcaggggctgggcaggcccctgcctgcatccagtttccactcgtgtccgcggttgggatcagctgagaagctcctgaacaaagtggcccagcctctcaaacatgtgaaatggggcaggccaccaggttgctggctctcctgaaagcatgtgcagctgttctctgctctgtgctcttcagagacatgcatgacacgcaggccctgcgtagctacgtttttaaccaagcagtgactgcccaaggccgggtggcagccgtggctcctgtgagtgtggctcccgctggagcgcgcggaggatgggagctcctgcgtcagggcagagcaagttcccagtccccggctgtttccaggtggttgggcacagggcccacaggcgcccctgtgggcagggtccggggggcatgggaggggctgcagaatccgcagctgaggtgccgggatggacccgaaacccaatcacagccaacagggaaatttcacagagaatcagatcccagtcgcgacaggtgctgtatgatattttggaattaactgaaaaaactcttgagactctggtgaaggccccagagatgttgagagtaagcagagacgctgcacttaggggcaggtggctgagctcagccacaggacccccggggttcgttcactccaagtggaattcgttaccacttcagtgcagtcccaagcaacatgcccatttgggggtgggtttgcagcctgatgggtgggtcgggccccctgagaacctgcaggcccggaagtgggggctgtgcttgcgtgttccagactcggcgggtagtgggggccatggccatgaggctccaggctggtgggggagtgatcagtccgtgtgtgcgtggactgctctgctgtgtgagggcgggggccaatggctcagagacacagcaaggccgcggaggagcccagatgagctgtgccctggccggcggtgggtggtggagacgcaaccagcagaccccaggcagtgtgggatgcgctcactgtgtgggtgaagggctccgccctcagggctactggcaccgccatgtggccagccccattcccagacccgcagagggcgtgggcaggcccaggaagcagtgagtcggggacagtcaccctccactgcagcagtgacccggggccacagcctgagcacctggatgctccccgaggtgggagcggcgttggtcaaagcggagaccacgtgtgccacaccccagagctgcctgcacttacaggcgtttcgagctgatccgggccaggtcaccaggtggaggaacgtcctgggaccagatgacactggctgccattttgtttccatggaggttttcatcatactttagaccatgttcaaaaaaccaacaaaaaccaaagctcaacagacaatttcatgcagtaaaggaaggactgatgtgaagatactgtgctatagctaaaatttagtctcacataaaaacagtttgatatagaacttaaattgtgaatttggttttatattctagaaacttccatgtgtgtattcattccccaggtagtgctggccattctaaggtgtattgggagagaatcggcacagccgtccctttggggctgaggacggcccgagccggccggctgaccctctgccttcatgtctccccagctacccgtacagtgaggacgcccgccagggtgagcagtacatgaacacccggtgcccagcctggtgtgaccgcatcctcatgtccccgtctgccaaggagctggtgctgcgggtgagtgtgtgctgccccagccctgggcacagagggatgtggagcgctgggtctggtctggcccagccctggtgacagggccccaggggtgggggcacccagtctggggaatgctgccaggttgggccctgacctcgtgctgccatgagctgcaccccagcattgggtcacctctgagccagcacctgggctggggcagcagcagatggagccgagttcctgggccatgggcagccagcgtcatcctgagtttgaaacataacacaggcggttagcaggaagtgttttcaaatcgtggttcattgtatccttggaagtcaacgtgctcttgtgcgttccagcgctcatgggctgggccgtgaagcgcagtagaaatgtctgaggttgttttcctaagttgtaaattagagccagattcatttgagcctcgataagttaaaaataaataggcgacattttcagatggcctgggccttgggaaattttcagatttcctgtgattttttttttttaataataattttttttttttttttttttttttttttttacaaaagaggtgataggggcttgcttgctacattggccaggctggtctcaaattcctgggctccagcattccacccacctcggcctcccaaagtacccagactacaggcaggagccactgcacccggtcaatcctgtgatttttcaattcccacattttaacatacaaggagtgttttcagaagaatcaatatctgaattggttttgtcaaccccgtgaatgaaaattaaatgcagatagtaatgaaagcttgcgggtgtgcgtgggaactgcagctgtgcccaacacccagagccggggcctctgaacataacgtgggtgtgcaatcggaaggaggctggagactctggtggttccactgccagcctggtgggctctgccccctctccactgtcccaggcccagagcagggacaggagccccctactaaccccgacttcaacaccagctgtgtgaggctccagttgtccctcactgcccatctgtgtctgtgccagacggcaccagaccccaggcacagcaaacacctgggtacaggtgtgccctcagcagggcggggacctctgcagccctggtccctgagatgcaccctgctggcctctgccatgtggctctgtctgccgggccgggttccttactgttccttcctacatcctggagcaccctgggtgcagcctgccctccgtccctggctgtgctgtgaggagcctgcctggtgggggcctgggctggaggcggggccccttggccagaagtccctggggtctgcagccagcctggctcctccgcagccccacctctggcctgtgggcagggcctgtgcccatcattgaggaaagtgtgctggccacaagcccaaaagcccaggagtgggctcggcctggagcctggctgtggacctgccactgcccctctggctgggctcactggtaggcacgccagtccctcggtgccacatggtgggtgctcccatctgccagtgctgagagcgggtcaggcatgtggagcccagggctgccaccagcggggcaggagcctcccggggactcgggcacagatgccatcccctgggaaaacgtcggaggtcacgcgagtgcagattggtgagcagcgcccaagggcagaaggctggcagggctgtggcctccccacattgtgctgccgctgccagggctccaccagctcagagcagggcagcgttgcagcccgttttccattcactcacagcctctcgggttctctggatccgggacttgacactttatgctcagggtgggggacagagcctcacaacacacacctggcggcctttgacagcccctgccttctggggctggagtttggacaggctctccccatggggccacccagtgggcagcgggtgtgcaggacaagcagacgggcgccgggcgcgctccgcagcctcatccatcatgacacgcgccgtcacctcgtcaccaagctccgttctgcctccggagccctaaaacaccaaaaggggctcgggacgcgggcggtgctgcttggggagcctcggtgacaagtgttcagtgaggtgtgccgcacgctgcctgtgcccgccgtaatttgtttatctgtccaaagattatgcagttgaaaatccacaattttatgctgcctttgtaaattaccacgctgcgtttgatgaatgtttctccacttctgcggaggcgccgcttcacccgcgagaggcgggaaggtgctcatgcatgcggtgccgaagcttgttttctcattctttctggcaggcgcccatgctggaaagtaaatctgaccttgagcttcccactgcattaaagataactcagttttacctggatagtctcagatgctccagctgtggatataaaattccagcccaaccagagccgagtgctgaccagcagcaaaccccttccggaggcgcccggaatacaggcacctgctgggaagtgcgcacacagccgtgaattactgtgcacagattgctttgtgtagtggtgtggaattcggtgtctgttctcgtttgaacactgagttctaggttaatagaacagtcaaaaacaaatcaaagtgggaagattggaactagatgggctgccgcactcagaggagcacacctgcacagaaagctggggcgcacacactcctgtgaacagggtcccctgcaactcccctgagagcccaggagcatgtccgggagaggggagcttgggagccgggccagcacccgcggctccccacgcgacccctcctagaggcagatacctgttgtccaaaagggccagggtcaaggtgctgaggcgctgccacatcaccagagcctttggtccatgagctggcctctctctcaggggccaggcagggcgggtggcagaggctggggaggtactggcaggggccgacatccccatctctctgcccccacaaaaccctgatgttcctgccagtcagctcccaactggacccagggtgccccacctccccacactcacctgtctgtttcccctttccagtcggagagcgaggagaaggttgtcacctatgaccacattgggcccaacgtctgcatgggagaccacaaggtgacatagactgaggtccaggggccaggctgggggaccaaggggaagctagggggccggggggctggggccagtgggtgggcgggtgctggggctggcaggcaggtgggcgggggttggccagtctctcctctcctgttctcctgtcttcttagtctgactacagagtaggccaagttggtctgtttttatttaattttaataaaatatcataagctaggtgggtaagtaggaagaaggcagaaatgacgttacaatagaataaaatacataatttaatatttgtaaaaaaatgtccacagctgattgtttctgaaggctgttttgcaaatatgcagcttcagtgttttaatggccttcttggggcaggctcactgtcagccgaggagccggggtgagggcgctccccaccgtgtgccaaggggcagcactggcacagatcgtttattcaggcaactgcacctcgagagtgtgcacaggagacagatcaaatctcattttcagccaataaatgagttagcttcttccacgttggaggcccagagctgtgagccccaaacacacccggataagacgctggacctgccaggtgcggcagagccgaggacgggagagccttccttccccgcttcatttggggcctatttagccattcttttacatcagtttttccattaatttttttacctggaaataacaccttccttgcaaaacctctcatggccggcctggctccagttccacattcacggggcccccaacccctgcgctgccgtggctgtgcacaagggccgagctgcctctgctggccatcagctcctcccagcccggttcatggctgccctggtgagacgcagggtctgggggtgcaacgggaggcggcggcatgtgctgtgctgtcccgcgtgcgccgtgctgacaccgtcctctcttcctgctgcagcccgtgttcctggccttccgaatcatgcccggggcaggtaaacctcatgcccatgtgcacaagtgttgtgtcgtgcagtgacgtggtggtaaatatgactcctccctccagttcagcttttacgcagcttttcctggtgcgtttgttcctttaacaaattacgaattccgtgacagggaagagatgccagcgccacgagaggacacttcgtgagcctccctgtagccgtggaccgaatacgcactcttgaaagctgcatcgagaacccgcccaagcgccacctgctagacggccagccccacacttcgcttcagcctccggaccattccggagcagcctcacatacctcactgtctcgtctgtctatgtgacattaagtagaaatattggttttttttttttttttttaaataagtcacagtcctgttgtcaaaactctaatagacagcaaagagggtctgtaccgtagacttcacagttttcagtttttaatgattgccagtggaggggcttcttcagcacagagaccccccactgtgtccagggaccccctctgccaggtggaggtgtgtccaggggctggggaagccgagacgggcactccctctgccggccggcagcgtggccctgagcatggcaagggggtctgtctctgccgatgctccttccgcggcactgactctgcgccgtgtcacatggtttttgaatcacactgcagctgctttccatttttatatatatataaatatatataaatatatactttttaaaaataatttataaatcttaccaaaacttatgctaaatatactttccagtatgaacgcacaggagagtcccatcagcaggcggcattggagtctaggagctcagctgtgtgtccatcaacacacaaattcgtaaaaaacacacatggcctcgccatcgtgggtaaaatcggccccacagcacgtctgcaccagcgggccgttactcccatgccgttcttctgtgtaatattaagaactgaatgtgaagtttatagctagcctgggtgtaccttttaagaattttgtaaaccgtttgtctgtcttttgttactgttttatggtgccaagtatcctacgttacaacaataatatcatgggagaaatagaaatagcctagtttgcttccaatagaaactgcttttaacatgggctgtatataaaaatattaaagagaaacaaaactgtacatttcctcattgctccgctacagacaacccatgtcataaccttgttgcaaatatttttctcctatagcagtaagtacagcattagaaggtgattagagagtctgttgatgaaacacaaatgtatgttttattgattttactttagaacactacagagttcctggaccgggtgaaggcattagctgggtgtttgtgtgggataaatactaccactgcaagtgactgctgtccgctgcggaatctgttcttggtggaagcacaggtccgtgtcgctgctgtggttgccgctgtccgcggttcaacacggagtccgccccgcgggtttcagctgttggtcgttctgaggggcctttggaagtgaccggtctggttcctaagcaataaaattgaccgtggtgaaaatagtcccgtgttgctttttcttcctttcccttctcctgccacctttgaaatgctaactcaggggagcggcctcctgtatagcctgttatttgagatcaagctcattagaaatcctggaatttcactgtatcacacgctgtcacaaaacactaagccgttcattgagaggagaaacacagccttttggactttctactgtaataaaggatttatccctcaacattttaaaacgggattatatcaacgctttgccttcctcaaaactttaagaagcccctctgctctgagctgagaggggctccccacagaaaagcgttgcttctgcccttcgagttgcttccttgtaaagaaggctgctaagagcctaaaacaaaacgcgccgagtttaagccctttctatttccctttaacgcttccgcaaatgccaagagaaatcgtaccaccgcagtgatatcattatttacatttaatttttaaaaattaaaactcaacagccacgcccattaagatgcagcgatgggcagccccggccacagaggctgcgggaggctggaggggttttgtcagccgcagtcacagccccgcggagctggcggcatttcagggcaggagacgggtcccccgagcccccggctgggcgctgcgggccttgcccagggggcctccggctccctgaccccgcgtgacccacgggaggccccgccgctccgcgggcggaattatttcggatttctctttgcggtcctagttcggaagaaactgctttccaccgcgggaagatctggcgggatggtgaccgaagggcctccgtgcagcggatcagacccggttccaccggctgagcccagggcgggcctatgggatccgctgatgcgcagagggactttggaaataatcagagcgaagccctcggccaagcgggaacgggtgcccggtggcaacgagtacgtggccccaaagcgggaaaacggaagaagaaaaacctcccgcggggactcgaggcgggtacgcggctcacccgccctttcgggaacccccaagcgcgtccgaatccgccccgaggcgaggcgggccgggccgtacctgctgctccgtccccggctccgtcccgggctcctggcggctgtcgctgcggttccttcccgcgggccgggccccttccctgcgccttcgccgcctcctcgcgcctgcccggggcccgcagcctccgcaccgggaacccggaggacccgaggcgggcgcaggggcgaagccggggccggggaggggccgcctcgctccgggttcgagacggaagaaacacgcggcgcaggctccggagcgacggctccgacggggacccgttaaataatttattgatgatacaaagcgactcgcgcccacccggggccgcccccggattctgcaaaaatagattcgcccccaccccgcgggtcctcacaaggcgtcccccgcgccgccgccgcacgggctgaccagcgccaagttcgagggtttgtgct

SEQ ID NO: 282 - DNA, 58736 bp, Homo sapiens
  source 1..58736: mol_type = genomic DNA
caggtccacaattttttttttttttgaggtggagtctcgctctgatgtccaggctggagtgcagtggtgtgatctcagctcactgcaacctccacctcccaggttcaagcaattctcctgtctcagcctcctgagtagctgagactacaggcacccacgacccctggctaatttttgtatttttagtagagacagagtttcaccatattggtcaggctggtctcaaactcctgacctcaagtgatccacccaccctagactcccaaagtgctgggattacaggcgtgagccaccatcgtgcctggcccaggtccacaatttcttatctcaaacttttggggacaaatgttttttcagaattcagaactgttcagattttagaaatgtgacatggcacatgtacattaaatatgagattacagcagagtgtgacacacaccccataattaaacgtattaatagttattcagggccgggtgcagtggctcacgcctgtaatcccagcactttgggaggtggaggcgggcggatcacgagatcaagagagcgagaccatccttgtcaaggtggtgaaacccgtctctactaaaaatacaaaaattagctgggcgtggtggcacgcacctgtagtcccagctactcgggtagctgaggcaggagaatcgcttgaacccaggaggcaaaggttgcagtgagcggagatcgcaccactgcactccagcctgggccacagagcaagactccgtcaaaaaaaaaaaaaaaagaagttattcagtgaaactcactcatgtacaccccgtgggataaataagcactataaatagcctcagctcagagttttcctcccggagagttgaggttaggactggtctggccttcaaatgagttgtgaagggctttcggaagtttgtggaattcagaatcacagataaaaggtcgtagataggcgctggctctataattagataagagaagggcaaaaagtttgcgaagcccaagggtgggagagtggcaagaggtacttatgcacagggagcacgtagagcaaagcgccctgggtgagaccctgaaagcaaacgaaagtttattatgtgtgtttgtttgattgagacagggtcttgctctgtcgcccaggctggactgtagtggtgcaatcatagctcactgcagcctcgacctcctgggctccaagcgatcctcccacctcagcctcccgaggagctgggactataggcgtgcaccagcatgcctggcttttatttttattttatttttcgagagacggggtctcgctacattgcccaggctggtatcaaactcctgggctcaattgaatctcctgccttaggctcccatagtgttgggattacagacgcgagccactgcgccgggccggtttttttccccctctcagcccccgcgctccgccccgggaactccgggagcgctcctggtcggccggccggcgcccgcggactctgcgcacgcgcatggtcgccccagggggaacgcaggtcgcttacccggctgggtaggtcggcggcctggttgccatggcagcggggtcgcgggccggcgccagggaaggccccgaggctgcgggcggccagggctgcccgcggattcccagacccggacgcccgagccagcaaccctgaggggcggccgggcagcgccgccaccatgttcctgggcaccggggagccggccttggacacggtaagaacgggcgagggggcgacgccgggcgggcgtccgcgaggcctcggctcgtctccgtcgcccgcagcctcggggccccgcgcaggggccggcccggggcgtgaggacggggcgcacggccgggtgacagctgccattattgttaccgcacaagagcgcgctgcaggccccgcgccgcctgcagcctcgcccgcgcccgctttcgcagaggccgccgcttccaggaagctctccgggacgccgcgccctcgcctctgggcgcctgcgagtctgcggcccgcaggtgacggagctcacggtgtaagtgcctccgggcacccccgatctaaggcgggatccacggatcccgtgtggccccaagccttcggggtgggagggaggcagccccagggtctgggaacccagcttggtcagaggaggcttcctggaggagggtggggcccgatgtactccccagggcgagggtgcatgagccttaggttagttactttgcccggtaaatatctactgtgtgttagagacacgggaataagctgcattccagtgggggggggggggggggcggagggacaaggtaataaacaggtaattaagatcgtgtcagaaagtgagaagtgctgtgcagaaaatgaaacaggcccatatggccgggagccgtggctcaggccggtagtcccccggtagtccctgcactctgggaagccgagatgggaggatcgcttgaggccaagagttccagaccagcctgggcaacatcgcaagaccccatctctacaaaaaaccatcacattagccgagctgtggtggtgcctgcctgtagtcccaactactcaggaggctgaggtgggaggatcgcttgagcccaggaggtggaagctacagtgaactgtgatcatggccctccaaggcctgagagacagagtgaggctgaggtgggaggatcgcttgagcccaggaggtggaggctacagtgaactgtgatcatatcacggccctccagcctgggcaacagagtgaggccctgtctcaaaaaaaaagaaagcccgttgggacgcgggcaaggagactgagcagaagatgggcatgagcctgactatggggagtcctgctggccatgcagggaatttggattttattggagaaacagaggaagcctttggaaggtttcacatcaagggaactgtgctcaccttgcttcctcctaaggagaccacagggttcagcacagctgcacccgcagtaggggcttggtgctgctggccaacttggagcagctgaagttgcctgcttgttccccagggcaccacgtcctgtctcatctggagggcctgcctgtctacactggccttcagttactgcttcttcatctttaagaacaaaactgcttgttgtgattataaaaataatttatgtatattatttattttttattatttttttaagacagagtctcttggccgggcacggcggctcatgcctgtaatcccagcactttgggaggctgaggtgggcagatcatgaggtcaggagatcgagaccatgctggctaacacagtgaaaccccatctctactacaaatacaaaaaattagccgggcgtggtggcgggcgcctgtagtcccagctacttgggaggctgaggcaggagaatggcgtgaacccaggaggtggagcttgcagcgagccaagatcgtgccactgcactccagcctggcagcagagtgagactctgtctcaaaaaaaaaaaaaaaaaaaaaagacacagtctcgctttgccacccaggctggagtgcaatgatgccatctcagatcactgcagtctctgcctcccaggttcaaaggattctcctgcctcagcctcctcagtagctgggactacaggcgcctgccaccacacccagctaatttttctatttttagtagaggtggggtttcaccatgttggccaggctggtctctaactcctgacctcaggttatctacctgccttggcctcccaaagtgctgggattacaggcgtgagccattgctcccagccctatgtagatctttgatttctttcagcaatggtttatatttttcaatgtacaaagcctatgcttttgttaaatttattcctaagtattttatgctttttgatgttattgtatattgaattttcttaatttcatttcagcttatttactgctaatatatacaataattttttttttttttttgagatggagtcttgctctgttgcccaggctggagtgcagtggcgcgatctcggctcactgcaagctccgcctcccgggttcatagcattctcctgcctcagcctcccgagtagctgagactacaggcgcccgccaccatgcccggctaatttttttgtatttttggtagacacggggtttcaccttgttagccaggatggtctcgatctcctgacctcgtgatgcacccgccttggcctcccaaagtgctgggattactggcctgagccaccacgtccggccttacaataatatttttatatgaatctcatatcctgcaaacttgctgaactcatttattatgtttactagttttttagtagattcattaggattttctatgtataaaatcatgttgtctgtgaatagagatagttttacttccttcttttcaatctgaatgtcttttatttacttttctcacattaatgtcctggcaaaagactcaagtataatttgaattgaagtgatgagaaaggacagccttgtcttgctgctgctattagaagggaaacattccgtcttcctctgttaaatattgtgttgccctggatttttgtagatgccatttattaggctgaggaaattctcttcatagattattgagtatctttatcatgaatgagtgttagattttgtcaaacataccttctgtatcttttgagaaaatcatatgtttctttttcttcattttattaatatggaatattgactgatttttgtatgttaaaccaatctttcattcttggtcttggggtgtgtgtgtgtgtgtgtgcacataaatatataccagtaccaattagggtacatatatatatatatataaaatccttttcatgcctactagcattttgttgaggatttttgcaactgtattcataaagaatgttggtctgtagtgttcttttcttgtgatatttctttgtctgcttttggtatcagtgtaatataggtctcatagaatgaattgggaagcatttccttcttttctgttttttagaagggtttgtgaagcattggtattaatttctctttaaatgtttgatagaattcaccagcgagaccatgtggttctgggtgtttctttacttctataaggtcagtagtgaggccccctttttttttttttccccctgtattttggtaatttcgtgtctctgggttttttttcttggctaaaggtttgtcagttttgttgatcttttcaaagaaccaacttttggtttcattgatttttctattgtttctattttctatttcatttattcactgtaatttttattcctttcttttacttcctttgagtttagttttctatctcctggttctgaaggtgaaagtttagattattggattattgccttgagatctttctttcttttttttttttaatataggcatttacagctacaaattgccctctaaacatggcttttgtgtttttgattatttgtttttgtttttcagagacagaacctcactctgttgtcgatgctagagagcagtggcacaatcacagctccctgcagcctcatactcctgggcttgagtgatcctcctgcctcggcctcccaagtagctgggactacaggcgtgtgccaccatgcctggcgaattttttaattttttgtcaacactgggtgtcactatgtcacccaggctggtctcgaacttctgggctcaagcagtcctcactccttggcctcccaaagtgttgggattacaggcatgagcaggtgctcagcttgcttttgtttctttgcgcctggagtgcagtggtgcgatcatggctcactgcagcctcaacttcccggacccaggtgattctcccacctcagtctcctgtgtagttgggaccacagacatgtgccatgatgcccagctaattaattttttgttgtgtgtgtgtgtgtgtgtgtgtgtgtgtgtgtgtgtacagggtttctccatattgcccaggctggttttgaactcctgggctttgagtcccaaagtgccgggattacaggtgtgagccaccacgcccggccctgcttttgttttttaaggtggaagattaggttatttatttgatgtgatctttttaaaatatagacatttacagctgtatgtttctctttgagccctgctttaggtacatcccataaattttgatttttaaaattcactcactttcggaggccgaggcgggcggatcacgaggtcaggagatcgagaccatcctggctaacacagtgaaaccccgtctctactaaaaatacaaaaaattagccgggcgtggtggcaggcgcctgtattcccagttacttgggaggctgaggcaggagaatggtgtgaacccgggaggcggagcttgcagtgagccgagattgcgccactgccctccagcctgggtgagagagcgagactccatctcaaaaaaaaaaaaaaaaaaaaaaatttcactcatcagccgggcacagtggttcacgcctgtaatcccagcactttgggaggctgaggtgggcggatcatgaggtcaggagttcaagaccagcctggccaacatagtgaaaccctgtctccactaaaaatacaaaaaaaaattagcctgacatggtggtgcacacctgtagtcccagctactgaggaggctgaggcaggagaattgctttaagctgggaggcggaggttgtggtgagccaagatcatgctattgcaccccagcctgggcaacagagcaagactccacctcaaaaaaacaaaaaatttcactcatctaagatatttttaaatttcccttgtgatttcgtcttagacccattgattatttaggaatttgttgtttaatatccaggccaggcacagtgactcacacctatagccccagcactttgggaggctgaggcgggtggatcacctgaggtcaggagtttgagaccagcctggccaacatagtgaatataaccccatttctactaaaaatacaacaattatccgggcgtggtggcggcacctgtaatcccagctactcaggaggctgaggcaggagaatcgcttgtacccgggaggtggaggtggcagtgagccgagattgtgtcactgcactccagcctgggcgacaaggcgagattctgtctcaaaaaaaaaaaaatctatacatttgtgaattcctttcttttgttgatttctagttttccttgttgtagaagaatatactttgaatgattttctcttttaattcattgaggcttttttgtggcctatggtctggtttatgtttaatgtacacttgagtagaatgtgtattgtgctgttgttgagtggggtgttctgtaaatgtctgttaggtttttagtgtctgctgatcaagtttttctaactcctcgttgatcttctgcctcgctctcctgtctgttaggagcctggccctgccaacaccttgattctggacttccagcctcccaaactgagacagttaatttcagtgtgaaaccaccccatttcttctgttacaaccaccctgacacaggctgattgagcttaacctactgtggaaataagtggcaacctcagatagtgcttgaaggaggcggaacagattggccattttgtgtgagtgcatgtgtgcgtgtgtgtgcgtgtgtgtgtgtgagtgcatgtgtgcatgtgtgtgagtgtgtgtgtgtgtgtgtgtgctgtgtatggttgtattctgctgactgcagtcatggatccttggactgttgtgtgattttaggtgcgtgcatgagtgtgtgtgcgtgtgtgtgtgtgcatgcgtgtgtgtgtgtgcgctgtgtatgattgtattctgctgactggtgtcatggatccttgggctgttgtgtgatttccggtcctgactgcgtttcacctcttccctgcactatgaccggcaggctggaggcagcacggctggaagggagtggtggagagggcagccgttgtgggtgagatcaatgcattttgtttactacacataaaatctcattcctttgttgaatttcaggtcattcaaaaagtcttcaagattttattcacagcaaggaataatgacagatgtttacagagaaagttgctgctgcttttctagacagttttcagcagtttcccctctgttctctgcaggcacgtccttgtgatgcccagggctgacttggcttttctgatcccccgctaacctgtgtgtccagttcccggcctgcccttcctcaattttgtgcataatttcaatacactttgctaaaaggaaaacttctctctataattgtcatatgctgtttatgtcttaaaaggtcaccttaaataggtgatataaaaaatgatataaaaaatttcagtcaatggctgatttttttaaacgctccatttatttggaatgcaccgtctttcctttgcccctcgaaatgcagtcacattgcacttgtgtcctggcctgtctagttgcaccttatccatgttatcatgcagccaggcatttctaatacagtttcacactgctagcaaaattggcacttcatgtactattagccttgtagaaaataagtttgcttttcagaacgcagtagcatcccattatgatactgcgtggactcagctataccagggacaggtagcacaaatgtcatcacctccaccccaagctgtagaactattggctcataatggggcattcagctctaacttccagtgtccgcattggaaagcaccaatatgatcttccgagggactttaaacattttatgcttctctttttggatttcaatttgagtgaatgagttaatacagaaacacttttgtcttcaaaaagcttcctttttttttttttttggccatcctcgtgctgaaatcagacagtacaagtcttatttcattccctggaccaggacaaagtcactggaataagaaggcaagaacctttataggcccaaatgccttctcattgtaatgcatatgttttggtttttgttggttttcgttttttttttttttttttttcccagctggggtcttgctctgttgcccaggctggagtgcagtggcatgattatgactcactgcagcctcgacctcctaggctcaagcgatcctcccaccttagcctcccgagtagctgggactacaggtgtgtgcaaccacagcctggcttattttttaaatttttaagattttttttgtagagacagtgtctcaccatgttgcccaggccgagtttgctttttaaaagatgactctcacccgttcttaccaggagacagtcacagattcgttgtgctttgatgtaaagatgaataagagtgagaacatttatgtaaaaatgaaatgctttcagcaagaactggttttgtttttctttgtcaagacacaattctgtgggaaatagtgttactagatttgcagacatttgcacgcctgctgggcggcgttttgtgttttgttccccccacccacccattccttctgatgagactgaggaactggctgctgcccagctggagtgttctgagtggcctcagagctggatttctggagtttctgtttcagcagctgtggacgggctgttttcgcttttgtaaacgtgatggtcggaagcccagcaggtgccgtcgagttacagtgtttgcctctcttcctccagggagatgacagtctgtctgcagtcacctttgactctgatgtggagacggtgagtgccgctgggtgtcagccgtgcgacctcgggctggttgcgctgcccttgcagactgcactcggaagcgtaaaataggccgttctccacaatactgtgtcgagagctggaatgcatattccgaatgctccttggtgtttgaaaagtttccagcccttaggtttaaatacctgtggtgataactttaaaacttttatctggacgtgaatcctgagcagggctcatgtgagacagattgctagtccctggcctgcagctggttttgccctgcaccccacgccctcatcctgacacttgaggggaggaggagagcccctgctaatgccgtcggaaggacccgatgggagaaagcagacctgggcagccgccatcccaagctgaactgctgcctggcctcccagcccggaaaggagaggggcaggagtggtgtccgatggcccagtggcacactatggccccggactgggctttgggtttgtttggcaagctgtgctgggtagaaaaggaagtgtgccaattgctcttctcgtgtatgagcgaaaaaagcttttcttactggagacgcagatctagcaaacctgcagccagcagaacgaacccggcaccagcagatctcaattccacgtttgctctgtggactcaagggggagcctcagctccactgtctccctccagggacctctgttcgcaaagttaaggattttccctccatgtcacagagggcaggggatgctcctctgatgttccccggaggaggagggatccaaaccaagccccagggaaaattccccccgcgcagaacttggggctcaatgtttctgctggaggggaagtgaggagacctggccgcggtagccttatctgctcggtctagtgcaaggtgatgaggaagttaaggttggaagcatggcagcatcttccccaggccacggcacgacgggttgtgtgtctctaatgcaaaatccaaaatgctccaaaaatggaaactttttgagcaccctcatgaggccacaagtgggaaattccacccttaagtacttcacacaagctttgtttcatgcacaaagttattaaaaacacaatataaaattaccattgcactatgggtataatgtatatatgaaacataaatgaattttgtgtttagacttgggtcccatccccaagatacctcattatatggatgcaaatattcccaaatcagaaacactcttggtcccaggcatctcggatatgggacactcaccccgtagtaagcagtggaaccagatctggaccccgttctgtgagatctggaccccattgggtgtttggcatcgtggttgtcacaggagaccaccttccagacagggtctccctttgctcggctttcttccatagtgggctttgcagttgacttatgtgcagggattcatctgaccacctccacctgagtggacagaggtgcgctgggctcccaggctggctgtgcgggcggtttgggtgggggcagatccgccatttgtgtgggaccctcagtctgaacgtcaggagcccgggcccgatggttttctgtaattggaacttgtgctctgagagcccagccctgagcactgacgtgagtgcatttttgtggggtctgcatcgggccctgcgtgtcctgttcctggaccctccttacgtccccgtaagctcacgtcctcttgctgctcttacacgacccctgaccctttctgaacatggtagggtcttgtgatgcaccactgtgggagctcagcaagccttatgccatttcttctttctttcagaaagcaaaaaggaaagctttccacaaacctccacccacatcgccaagtaagtatgacgaggcctgccttccctctcacgccgacgttccctggtgtcctggagagaatgaagggtatttgctttgtacatttaggtagctgagacctgacgcctcagccagttggccccattcccactggggtctcccagttcgcgctggagtctccccctttcatgttggggttcatgctggggtctcaggagcacgtggagtccctgttggtgccagagtgacgagccctttctcagggctgaggctgccaccaactccccagtctcccccgacagtgcctctaggccttttgttttctttttcttgctttctcaaaggcttacctcttctgaatgctgccagagttaaaggatttttgacctgggatttgttcctgagagtcgaagttactgagaaggtgtagttggtgggacgggtggcaagttcacctttttcccctttggatcatcctgggcttgttttgctgccagggttctattcttcctcaccctcagcaggaggagggcagcatttgccaccctgcttgtccaggagggtgccgcggaggtggggttagtccaggtggccccgaggcccctctgtctctaatgccgctctcgtgtacagcagcccgtgtgccgaccttgtgcgtacgaatgtgttcgtgaccctgtaaatcctaggccggcatcctgtgctaccccaaagcctgtggccttccctggctgtgccatctgtagatgtgtgtctattttatatacgcgtatcatatatttcaaaggttcagtcaagtatatgacgcactcagagaatataaacaaactttgctactagcccaaggaaaacataattaggtaaatccctgcacagaaaagaatgcatgttatatgttacaaatcaatataaacactagaaggaaatcacctagcaatttggatttttgatgtcctttctctccttccatggagaaaattgagaattgatataaagtaaaaggccaggaccgggggtgcctcctgactcacactcgggacctgtttttctccgggtttctagtttcgtgagtgtagggaccatgtctgtcctgttcactcagcaagtgtttttctccaaggcctggtcaacctgcttgtaggtttgcagctcccaccacgttccgaggcttttcatcgtcctggtcactctgccaggagggcgaggcaggcgatgatgttttcctgctttccgagtttgtcgttttccgggcagtatcaaacgctggcatctctccaccaccctgtctccgtcctctcttcttccctccccgcttttatccccgctttcatgctttcctgaggaacccttcctactcgccgataagcccacacactcttaggagggaaatgtaatgtgtagggcttttttctgctcactcatttacttgtataaatgacaacttaaatctttacgttttggaagaatttgagactatctgggaggccaggttctgtggtcccgggtaagtgaagatgcagcagggtccctgcgtctttattccctcattcacagttacggtggcgaatttcacataaattgtgaaaccgcgggaaaaacttagaaacttaaacattttgaacatattagacttaaattttcagaccctactgacatacattttgcaatttaagatatataagaatgttttaagagtgccttagtttttgcatacgtttattatcttttttatacttaaagagggaaaatctcagataaagaattttaaaacatttcccttactttcatacaaaatcaagaatgccctgaaacagtaagatttttctcatttattttagatattttacatattaagttctaaatattgctctgtcactatgtagtgacattaaaaatgtgacatgttaaaaaggcacaaaacgatgtgttcactgtggctgtgagtgtgtaagaacacgcacatctctcaaaattgggggtgagaaattaaatgctataataaatgttggtagaattcatatatttcccattatattcttcccattcttttcttttcttttcttaagaaaagcctgttacccaggctggaatgcagtggcatgatcatagctcactgtagcctcgacctcctgggctcaagagatcctcctgcctcagcccccttgagtagctgggaccacaggtgtgagccaccacacccagctaatttttagattttttatagagacagggtcttgttgtattgcccaggctggtcttgaattcctggcctcaagcgattctcctgccttagcctcccaaggtattggtattataggcatgagccaccatgcctggcctcattatgctatttctttataataaaagttaaaggagaaatgtcagtatataggtaaagtaactcttttttcatttttgccagaatgtttgactagagtcaccacgctcgtggattttgttttcctatttctgtctttctgaagttcatgtgttgagctcacatgttgctgtccggcacctctgaatccacgtgttggcttttccagagtcaccttatctctctaagccgagaaaagtggcctcctggaggtccctcaggacggcagggagcatgcctctgggcggccgagcgtccctgaccccgcagaagctgtggctgggaaccgcaaagccaggtatgtggttgtcgcactggagacccttcctgcttgagagaagagttcgagaaatttcagggagtggtttgagatggagtttttaatattccttgtttgaattacattgtctttagttttctcgaagacatcaaatatacacatcgtagttttatgtcatgcataaatgtggtttcgccaagtggcgctttagcctcccttggtcccgtgtggtctctacatgggagtggtgagttgtcttgccagagccaactgttatagtcttaggagtttggtgggctggtcagtgtcatgctggcaacctgatattagacatggtagaaatatgtataccgtggaaataggcaaacattgtaatcaggactgtattaattgatatttgggagctggttggttaaccatttaccagcacgacactgacggctggcgtctatcagtgattcagctttcttcaatccaggaaagttgattagaaacaaaacctcccattgtgtgtgcttgtatctgtcatattaaacccatgcacattcaaaccaggaagtctgacccaggccctgaactcacccctcacctgggagcatgcgtggactggcgtccccggcggcactcctgactgtctgacagacaccttcagagtgaagaggccacatctcaggcgctctgccagcaacggtgagcatgccgatggtggcgaggctgaggccaaggaagagcagaaaggaaaggacagtctctgggctggaggcgtccttcgtcagagcaggatttctggcttcgtgcatgagctccgtcactgggaggttttgggaggtcgtgggagcagtgactcacacagtgactcacaaaaacccgcctgccccagaaggtagctttcctcgtgggtgcagggatatctcgccaggtgtcatctgtacctccctccctaaacatagaggcgtacttaaatttattcattgagtaaatgatattaggaacaaatactaataaataaataatgataaaaagtccaagtcgcaccaaagagaatcagcttgtttctgtgtttatgttcctgcctagtctctttttttttagagacggaatctcgctgtgttgcccaggctggtctcaaattcctggactcaagtgatcctctcaccttggcctcccagaatcctgggattacaggcatgagccaccgtgcccggcctctctctttatccacgtgtttcccacctatcctccttaaggaagaacagcctccagggtgtattgaaaacctcctcactgtactccaggaattgattaccttcctgcttttactggttgggagttatcttttaggctgaaatttagatgtttaatatactaggtatcattaaaaccaaagtaagcctgactgtttttacattggaatgggtgttgagatgctctgtgcattttttgtgtttggtatttgtttgttttgctatttaaatctgaacatgtccctcctccttccgtgagtcccttctttcatccttttactgtcatgaaacttggtcttcacatgtttatttatttactttttgcttcatctctctctatctaccatttttgcttttcttgctacttggtgtgaagtatcatgatcaggctggaaaacatggaattattttggcttttttattttcttcttttttaaaaggaaatgttactaacttccaggttttccttaaagtatagccaagaattctttctactttgtagatagtctttgaaacgatttgtttatgtttctctaggtcatgtccctgggactcctgtctacagagaaaaagaagatatgtatgacgagattattgagttaaagaaggtagtatttcggtttgttctctattgatttgaaacggtgaaagcttcctataacaatgtattagaacatcagtgcctgtgctgggaggtgcccagatgggaagagcgggagcgttagggtcgaacctgagtttgagccgtggcgtagtgccctaggagctggtgtccctggttaaaggccgtagcaccagcacataaaaggcagcagagctcatgttccatccgtgctctgcttctccagcacgatggagaagactggatgaggactagattagcttcagagtcgccttgcgtcctgagattgggtactgtgataaggtcactggtagagtcatcagtaaccttccatgcatgccacgctttatgttatcaagacatctcacatgccctgtctcaggccctctacagaagctctgtgggacgggcagaaccacttgttacaaccacagtctgctgatgaacttgagactcagcgacgttagtggtctgtccaaggttaaccagtagcagaaccaagattcaaggtcacctgcctcccaaggccaagactctgtacttccccatggcccctcccatttatgaaagcatgaactgcattgagctgtatcgtcattgtcactgccaccagcaccgtgaccatcacactggctttcagtatccgtaaatgtttgcccctggagaaatcatctgcgttcatttccttccataattttagtctgtttatacagctactgtctccaccagttgatgtgtgtctgagacactgcgttcagttggggcaccagagggcaatagggcattggcagcctcgtccccagagcacggaagaggatctggaagccgtttccattggggagctgggaagaaactggggaacctggtgtagaccattatacaaaagacagcgccttctctgttggccagagagaacagtcagacttgaggctgtgtgagaagaacgctctaaccacgagagctgtctgacagaggctgcgctgctgaggagcaagtgcgcaccctggccatggagattttgagcacaggtggcagctgtgtgtcggggatgttacagaggggatcctcattccggttggaagactgcgctgaatgaactcagtgtggattggggggattatctcgtttgggattttctcagtctcttgaatctataggtttgtcttttgttaaatctgggacattttcagtcatcaagtcttgagttgttttttcagccttgccctctttggttacggctgctcaggtcccttgtctctgttcagtgttttcccctccgtcttccctcgtgaagatcgggtagcttcactattctgtcctcgagctcacggatgctttctgctggcctctgcatcctgcagttgagcccgttgtttgttgggtgtaaccttactgtctcggttcagttctgaaatctctgtgcggctccttctgtcttggtcttcgctgagacgcccaccctgtgcctcttcacttgtttcaagcgtgcctgtcattggtcactggcgcatctttgtggcggctgccctaagtctgtggcgggattccaatgtccaggccatctcagtgttgacattatggcttgtttttcttcattcaggttgagctattcttggttcttagtataaaaagtgatttccttgaaaccaggacgctctgagtgtttcatcgcgagactctgactcttgctcaatcctgtgttgtggcaggcctcctttcacgctgccctgtaggtcaagggggtaccacctcgttatcacccgcgagggtggaggtccagttcccactcagccatcatcgacacctgcaccgggaggggctcctcattcccactgggcagggtgggagttcaggcccctcactcagcctctgctgatgccgccctagctaggagggaaggtgctgacaccgccctagctgggagggaagggccacctgtactgctcctgctcagcctttgctgatgcagggatggccttgttgccgccaggtaatgatggtcccgactctgcccgacctcctctggagccccaccagtgcgggaggggagggtactgggtgcagccgggcaagggtgagtgtctgggctccccacacagcctgtgctgtggggaggactgtggtgttttccgtggtctgcctggggtagagcggttcctgcctgtcggtttctgccttgtcggtctgctcctctccctgacctctggctggagagaagaggctttgcgtgggtttttatggtctgcacccattggcttttttaggcagttggtttctccagcatccagctcagatgaggcagaaagaaaactgaaggagctccctgccgtgtcgatcgctggccccccggctcccggcccatccgcctccttctccacctttccagtcttaggttgcattacacatggagcgcaggtgttgagtggtactgacaggaggaattgggaggagtgaatctgcttcacgctcttggaagcggcagtcccgttactagagctcccatcttccttgactgctgggccttcgctaatttacttcacaagctgagtaccggcttgctatcatgcctcctgaatctgtgggtttgtctgcaacgatcttgccagctgtggatgtggctgaagtgccgagccgcccccgcggggtgtgcattccagattgtcttttgctcagaggtccagtctctggaataccacagtcttttgcaaggagaaggccgtgtatgaggatggctggtggttagatgcaggctgaggctgggagctggtgagctgcggcacagcccagcctacacgctgtttctttcctggactttaccacgaaaatagtaggaagaacataatttcaaagtacaggatagttgtagagattgaataaacttagttttgtgagaaatccactacagagtctttttttttctttttttttgagacagagtctcactctcgtctaggctggagtgtagtggtgcagtcttggcttactgcaccctgcccctcccaggttcaagcctcagcctcccaagtagctgggattacaggtgcgtgccaccacacctggctaattttttgtattttttgtagagatggggtttcaccgtgctggccaggctggtctcgaactcctgacctcgtgatccacccacctcggcctcttaaagtgctgggattacaggggtaagccaccgtgcccggccccgactacacagtcttttttgtccccactcacgtcaccacaaattggtaaagaatttgtccacagataaagattgggaagcactgccttccacctgagctgtaactgaggatgagcatttgaaatgcatgttagccttggatgagttttattgataaaaatgcgaacaaaacggactttcttgtgtggtcatgggagaaaacgcgtggtgcggcaccgtccagccccggtgttggcggtattcgtttaggcgcgcattccgtgggacggggtttctcatcacgggttccgttggtatctagggtgggaccgttcttctctgtgggggacttcctgtctatccagccttccacgtccccacccactaaatgccaggcgtgccctccggtgccctcacgtgacatccagatttccccccacccaccacacacagagccctgagtgggagccacgcagctttccaaatcccccagctcagtgcttccctgggcctgtgcgcggtgtggtgtgcgtggctgtgtgtggtgtgtgtgcagtggtgtgtgcatggctgtgtacgtggggacgtgtgtgcggtgtgtgcgcagtggcgtgtgcttggctgtgcccgtggggatgtgtgtgcggcgtatacacattggcgtgtgcgtggctgtgcgcgcggggacgtgtgtgcggcgtgcgcgcattggcgtgtgcatggctgtgcgcgcggggacgtgtgtgcggcgtgcacgcattggcatgtacttggctgtgcgcgcggggactgtgtgcggcgtatacgcattggcgtgtgcgtggctgtgtgtgcggggacgtgtgtgcggcgtgcccgcattggcgtgtgcgtggctgtgcgcgcggggacgtgtgtgcggcgtgcccgcattggcgtgtgcgtggctgtgcgcgcggggacgtgtgtgcggcgtgcacgcattggcgtgtgcttggctgtgcgcgcggggacgtgtgtgcggcgtgcacgcattggcgtgtgcgtggctgtgcgcgcggggacgtgtgtgcggcgtatacgcattggcgtgtgcgtggctgtgcgcgcggggacctgtgtgcggcgtatacgcattggcgtgtgcgtggctgtgcgcgcggggacgtgtgtgcggcgtgcgcgcattggcgtgtgcgtggctgtgcgcgcggggacgtgtgtgcggcgtgcccgcagtgtcgtgtgcgtggctgtgcgcgcggggacgtgtgtgcggcgtgcccgcagtgtcgtgtgcgtggctgtgcgcgcggggacgtgtgtgcggcgtgtgcgcattggcgtgtacttggctgtgcgcgcggggacgtgtgtgcggcgtgtgcgcattggcgtgtgcgtggctgtgtgcgcggggacgtgtgtgcggcgtgcgcgcagtggcgtgtgcgtggctgtgcgcgtggggacgtgtgtgcggcgtgcccgcattggcgtgtgcgtggctgtgtgcgcggggacgtgtgtgcggcgtgtgcgcagcttcgtgtggatggctgtgcatggcccttgttttcttcagtcattgcacgtgcagaagagcgacgtggacctgatgagaacgaagctccggcgcctggaggaggaaaacagcaggaaggaccggcagatagagcagctcctggatcccagccgcgtaagctcctggcgcttcacggacggggcaaggggagggtcctcggggcagcatctgccagccagccctgctgggggctacaccgaaggccgtcttcatgtctcaatctgcttaccacagggcacggattttgttcggactctggcagagaaaaggcccgatgccagttgggtgagtatggtgtgtgcaggacagagcctttccccagacgctagttactggggacagccacagagggacgcctttccctgcagcacccacgcgtgaagagcagcaggcaggggggaggctgcggacccccaaacccttctccactgacacctggggacaccacggggaggggggccagcaggctcaccacagaggccaagcaagacactgtaggaaaaacccatcacaacgggcgacttccccctcacacctgagaaaatacattaagcttaacaagcgctcccagcgctttgggaggccgaggcaggcagatcacttgaggtcaggagttcgagaccagccttgccaacgttgtgaaaccctgtctctactaaaaatacaaaaaagccgggtatggcagcatgctcctgtagtcccggctactcaggaggctgaggcacaagaattgcttgaacctgtatggcagaggttgcggtgagttgagatcgcgccactgcactccagcctgggtgaccaaaaaaaaaaaaaaaaggtgctacagatgtaaatcagggaaccagggcagcaataacgtccttcagatagatccagacccccctcagatactatgtgacaatatgtaagaagttgaatgaaatggaagcagggaagatgttgcggttcggtggtaatgctgtggcgatcagctgtaggtggcacagtacacctcctagcagtcaaggaagtacttctctaaagtgggacatggtggaagaaaaccgaaagggatacgattttgagattattgaacgcaaagaataaaataacattaatgatgtgattaatggatttgataatgtaaaattaaaagttacataataaaaagccatgggactaaggtagcaaccagatcactgtaatgggggaggagaaggatattatggatcaatacaacaaagttttctgtttagaaaatacaaaaaaaactataaatctctaaagaaaaaaggccgtgtcctctgaactatgtcacagatatagaatgtagaaagattgtataatcattacatgtttaaagtagatggtgaaagcctagctcggcacctaggacggcacaaagtaaatccttaacaaatgcctgtaagtagtgggtacttttgtaaagaaaaggctccatgtttttgttgttctggtggtgtgtgtgtgtgtgtgtgtgtgtgtgtgtgtgtgtgtctgtgggtatttttttttttcttgagacagggactcactctgttgcccaggctggcgtgcagtggcaggatcatggctcactgcagcattcagctcacgtgatccctggcttaggggatactcccacctcaacctcctgagtacccgggactacaggcacgtgccaccacaggcagctaatttttttttagttttggtaagatggggtcttgcgaagtttcccaggctcatgtgatccttctgccttggcctcctaaagtgttgggattacaggcctcagccactgcacctggctgaggttagtttaaagtaggaattccagatcctagggtatatgcagtattcattatcatatggcaaattgtccatcagtgtggctgtgccctgtggcctgccgtgtctacgtgtcatcacctgccttcaagaaacatttgcagatgtgcctgaggaggcctggccaaggatttcgattggaggattgaccagaatcacaaaaatgggctacaacttaagtatgtgtcagtaggctacagtgatagattttagagcatagccaaaaaaaaaaaaaaagattttaaaagtgtctatctgccgggcacagttcctcatgcctgtaatcccagcactttgggaggctgaggcaggtggatcacctgaagtcaggagttcaagaccagcctggccaacatggtgaagccccatctgtactaaaaatacaaaaaaattagccaggtatgatggcgcgtgcctgtaatcccagctactcaggaggctgaggcagaaggatcacttgaacttgggaggtggaggttgcagtgagctgagatcgtgccactgcactccagcctgggctacaagagtgaaactctgtctcaaaaaaaaaaaagtgtctatcaatagaggctggatagagatactgtgggaaatagtgtggattcacaggcgccagcagggacagagcaccaggaggatttgttgaatgttagaataaaaaaaaagaaagatgcagagggatgtgtgtggcagagccccgtttctgtgagaacagagggcctgactccctgaatgcacacacacggccatgcacagaaccaggtgctgaggggcacgcaagcggaaacaggatttggttggccgaagaggggagtggccaggtcagagtattttagcctctataacatcatcttttttttttgagacggagtctgctccagctactcagctactcctgagtagctgggactacaggcgcccgccaccatgcccggctaattttttgtatttttagtagagacggggtttcaccgtgttagccaggatggtctcgatctcctgaccttgtgatctgcccaccttggcctgccaaagtgctgggattacaggcatgagccaccgcgcccagccctgtaacatcttctttttttaaaggaaaatgtattcatctatgactaacataatttatttgtttatgtatttatttattttgagactgagtctggctctgtcgcccaggctgcagtgcagtggcgagatctcgactcactgcaccctccacttcccatgttcaagcgattctcctgcctcagcctcctgagtagttgggattacaagcacctaccaccatgcccggctactttttgtatttttagtagagatggggtttcaccatgttggccaggctggtctcaaactcctaacctcaggcaatctggctgccttggcttcccaaagtgctgggattataggcgtgagccactgcacccggccaactaacataatttaaaatgactttaaaatccaatttaaaagttgtctgttcaagcctggtgtggtggctcacacgtataatcctagtactttgggaggccaaggcaggcagattgcttgagtccaggagttcaacaccagtctgggcaacatagtgaaaccccatctctatttaaaagttgtctatttagaagaaaagaatgttcttttttttttttttttgagatggagtctcgctctgtcacccacgctggagtgcagtggcgcaatctcggctcactgcaagctccgcttcccgggttcatgccattctcctgcctcagcctcccgagtagctgggactacaggcgcccgccaccgcgcctggctaatttttttttgtatttttagtagagacggggtttcaccttgttagccaggatggtcttgatctcctgaccccatgatccacccgcctcggcctcccaaagtgctgggattacaggcgtgagccaccgcgcccggcaaaagaatgttctttaaagaatataagaatattgtctcctctaagcaagacattcacagaaaaggaggtgaggaggccgctggagctgttctcccttccccaaatagaggggagtggctcctcaggcccctacggccgcgctgtctcccaccctcactcactgccccatggagactgaactgggcggccctaggggcttcaggtctgtggtttatccagctggtgatggggctgcttcttttatttaatataatcaagggcacaccctgctctgtcccccaggtgtgcagtgtgcttgggggagggctgccagtcggtcagtgtgcccacgatggctgccacctcctgctccagccggtgtcgcacccctgccattcacccagccttactcagggacaggacagcacagtggggccctccctcttccctgggcccgtagtctagaagagagcacagcgctggagggaggaaggacagtgaggtgtgccggtgctctggcaggaggggacagccgcttctactgagggagagagggcgtggcctgcctgatgggcacgttccccgggcaggtcattaacgggctgaagcagaggatcctgaagctggaacagcagtgcaaggagaaggacggcaccatcaggtgggcgcagggctgcaccctctcccctgccttccgccccgtgttctgcttgctcagacgcccgcctttgttcctcccccaccccgtcctgtgtccctactcccagcccaaagccgaaggtgaatgttagctgcctctttttaatttttttattgtctttgtttcctccagataattccctttaacttcttcctgttatatttaaaagatgctttctcgaaacctgcttgttctgtggacccctgtatctttccaggatgaggttttaacgcctcagtcctgcgccgtccttgtgctgtttttggcgtggctactcgcatttctgtacctgactttcgagtgcgaagggagagtctttctgggctgtgttttggtttctttaagggaaactgaggccacacgtccattgccttatgtctcctgttcgtacaatagttcccccctcgtttcctgccgaattttgtcaacttaagtttgcagattttgtcttatttcagtgcagaacctccatgactttgctttcgtttctctatcgatgtgtctatctaaagtctactctcttttgagaccgaggggatggcctgacagtgccagggaaaagtgattctctcttccttacaaaaccatccattcaaagacggcttgtcctttctaagctccaaggcctttccgcaccattaatctagtcttttaaagacagcatcttacttggagaagaatatctctggaaaagctgtttactcactttggaaagtggctggtctacacaggagatgctttccagcgtgaggaattctcccatcaggctcgaaacgagtcacttgttcaaggaacaagtcaaatgaaggcccgttcaggcttttccctcccatcctgggtcttttccaaagcctctcctcttctgaacgttctgggaaactcttcctcttgctctgtcccctgggaacgctggcacatccctattaacgctgaacttgggttttcagcaaactccagaccgatatgaagactaccaacctggaagagatgcggatcgccatggagacatactacgaggaggtgcgccgtgctgggcggcggagcggagggcgggcaccgagctgggcggcggggcggagggcgggcaccgagctgggcggcggggcggagggcgggcaccgtgctgggcggcggggcgggcaccgagctgggcggcggggcggagggcgggcaccgtgctgggtggcggggcggagggcgggcaccgtgctgggcggcggggcgggcaccgagctgggcggcggggcgggcaccgagctgggcggcggggcggagggcgggcaccgtgctgggtggcggggcggagggcgggcaccgagtgggaggggaccggcgctggccccgggtggtgggccgagcccaggtggcccagagctgtgctcctggagcctgctcctgcttcagcccaacggaaagatgaagtgcggccacttagttcccgcttctggccgtaggcagcggtcaggactgtgatgttggtcttttcagataaggtcttctccatgctagccttgtgttttcatgcatttcaatttggtatttacaggtgcatcgtctccagaccctcttggcaagttctgaaaccaccggaaagaagtatgatggccgcttgcaagctgtgttttgtgtgttgccttcacgttgtggaagctcctctgagaatgtgtggctgtcacgtgggtgcggcatatactgcccttagcttggcagtgctgccaacactgcacctgttctgttcagggttagagttgacacgtttccatttgcagtgttcacagactcctcatagtgaccacgtgttgatggccaacgcgtgttcaatgccgcccgtgttcgttatagattctacatcctgccttccagcttagagctagaaagtgctgtttcaaagcagagccacctttttaggaagacattgcacacaaggacaagtttactttgccacctaatgttttcctaaataagtttatcaggagaaacaccgaggttctccttgtctggtagatctcccacatccctttcccaaagcttccatctgcttctgggtggctgatctctgatcatggctttggccacgtcactggcctctgcagcagtttgctgacgtcgtggactgctttcctttttctttacccctaatccttaaaactggttggaaaactttttctgtaaaggaccagatgctaactacagtcgattctcattattcagttataaaatgtctgcaggtttctgtagtgtagtggtaatcacgtccgccttacagagttataaagtctccatgaacatagaacgagcgaatactaaaccactgctccaatgggaggtacagggctcctgcgagcttctgctcataacattttttttttttttttggcaaatgttgcccaggctggagtgcggtggtgtgatctcagctcactgcaacctctgcctcctgggttcaagtgattatcttgcctctgcctcccaagtatctgggactgtacaggcacatgccaccacacccagataatttttgtatttttagtagagatggggttttactatgttggcaaggctgttctcgaactcctgacctcaggtgatccgcctgcctcagcctcccaaagttctaggattacaggcatgagccaccatgcccagcctggtcacagcattttcatcagctagtcaatgtataacctggctaacatgtgtctctgtttaaagacaccctgtttaatagtgattgtggattaattttcatcaaactcatggctggcctgaacgaggcttcttgcacgcgcataagcgtctccacgggggcccacacagccttcctgagcttagaggcactggacggcactcagcactgcagtccagcccacgcaaggcagcgtcacgagcaaacagcacagaaacgtgagagccacagcgccaggcaggccacagaaagcacacttgtttttacctgagctgaggtgaggagctgagcaccacctgggtcagccccagctgggaacgtgcgcgccagcgactggcatttttcatcacctgtgcacgtgcaagaatccccacaaaacctgcatgagtattgattttcggctgatggatccattttagcagcaagcacatttgcaattacgggacctgcagataatgaggatcgactgtactttacacctcctgggctaagaggcgaaacccgagctatcctgcaagcacctggcgtaacaagatgcctttccacagcccttctagtgatggcatggaaagtataatactgatggttgaacacggtattttgttacacaggtttaccttgcataaggatggggttccattttgggtgctaacattttgcttatttagagttcaaagttattactgcctattcgatttcaaatactcacctgcaaaaaccactctgagctcacaaccaacagagcaagctgtgattcacctgtccctcgtttcaagcatgtgtgaaaccagcttagcaatgcaaacctcagtccacgatttggttgttccaggcccctgggggagaagaagacgggcgccaaaaggcagaagaagatgggcagtgccctcctgagcttgtcccggagtgtccaggagctcacggaagagaaccagagcctgaaggaggacctggaccgcgtgctgagcacctccccaaccatctccaagacacagggtaccttcctgaaagccactccaggagggaggccagggaatggcagggaatggcagggcatggccactgggtaggcccaactgaggacaggcaccacgagggcagatgtgaacccttgggcaacgccagttcccacatgtgccagcacctgccgcgggccacgcgatgccccggggatggagccgcaaacagaagctcacagacatccctggaggagacaatgctgtgggagggagagaggagctgggtcagatgcgtgacatgtgtcagatggctgtaagtgccatggaggaggggaggaggacacattttggggtgaggcaggtggtgtgtgcagctgcaagcagggttgacaggaaggcacccccaagacggtgacagctgagcgggacctggaaggggcgagatagccatgaagacggcagcaggcgtgggacaggcggggcagagctgagtgcctgggagacacgtggagtgtggcccctgaggcccagcggggcgaggcagggtgccatgggagccttaggggtgctgtgggagtgttaggcagagggtggaggggggccgtgctgcttcccgaggccccctggcttctgtgcagagatggggatggtggcagacagaggcttctgcgcttgtctagtcgggctgctggtggcctggatgggggcagcagtgggtgtggtgaaaggtgttcagggtctggttgcatcttgtagctggagcttagggaaactgcagagagggtgtaggctctgagagggagcagccaggctccaaggctttttgtcccagcagctgaaaaagacagagttgctatttcctgagatgggggaggcagaggggcaggtttggggaaaggccacgggaggtctgagtgtgtgggagtgggggccaggcagtggctgtgtgggggtgcgaggcagaggcctgggctggagaactgagcatgtgggtcaccagcacttaggtggatcgagtgaggtcacctggagtgagaggagcagggggtcaggccctgaacttggcggtatatgggggaggcgaggggcagccagcgaggcagaggggaggagtggctagcgaggggctgtgcatgccaggaaggggacaggctgagaaccgattgttggatttggcagactgacagtcatcggagatcttgatgagaactgtcttaatggcctggccaggtggaatcgggaaaggatgtcaccccgagatgcttggaggctgttaatacagacatctatctcttcacgatccaagggggcagagactgggccagcgctggcaaaattctctggtagccaggacctgtcggtgtggctctgcagccccgcaggctgctccggctgcggaagaggagcctcaggccatacctgagaagggtggccctgctggcagtgcccaccaggatgccgttttgaaaccgcattgcttccatcaggttatgtggagtggagcaagccccggctgctgaggcgcattgtggagctggagaaggtgagcgggcgtctcagtgccactgtcgttggggaccaggggcctcatgctgtggggacgggctcacagggtgcggaaggtggcgctgagcatggcactggctgtctgccaggcagcgccacacacagaccgcaaggagacttcttccaggtctagacaacgctgaaggcagctctcatgcccctcgctgggctgtgagcttctgtgcgtggccgcaggcagacgcgcttcgcactggagcccctcacagtccagcccgcctgtgcaggctgtgggctgtgcactgcccgctgatgaccaggcactgcttcccaccactcaagtcgtgttggaatccacaggaaattgttgacccaactcctggccaggcagaaatgtcgggaaatgaacatttccccacatcccctatgcgactgcaaagtaggaattaggctgattctattggaattggacctttgttttgtttttgtttttgttttttttttctttttttttgagatggagtctcactctgtccccaggctggagtgcagtggcgcgatctcaggtcacggcaacctccgcctcccgagttcaagtgattctcctccctcaacctccccagtagctgggactacaggtgcccaccaccacacccgggtaattttttgtatttttagtagagacggggtttcaccatgttagccaggatggtctcgatctcctgacctcgtgatccacccaccttggcctcctgaagtgctgggattacagacgtgagccactgtgcctggctggttttttttttttttttttttttttttttgaggtggagtctcactctatcgcccaggctgcagtgcagtggcgtaatctcggctcactgcaactttttgcctcctgggttcaggcagttcccctgcctcagcctcaccagtagctgggattacaggtgcccaccaccacgcccagctaatttttgtatttttagtagacatgaggtttcaccatgttggccagactggtctcgaactcctgacttcaagtgatctgcctgtcttggcctttaaagtgctgggattacagtcgtgagccaccgcgcctggcctggacctttgtattttaaatagtaaattagagcatctgtgttgtttggccaagcaaaataaacctagagggaaaaacgtttttaaaaaatagttttttacatatttacaacatagaaaactagccaggtacaatgactcacaccagcaatcccagtactttgggaggctaagctgggaggattacttgagcccaggaatttgaaaccagcctgggcaacatagcaagaccccatctctacaaaaataaaaacaattagcctggtgtggtggtgcacacctgtattcccagctacttgggaggctgaggcaggaggaacgcttgagcccaggagttcaaggatgcagcaagctgtgattgcactccagcctaggtgacagagccagaccccgtctcaaaaaaaaagaagaaaaggttctataaattgtgggcatttaaaatatagaacttgttgggaagtcaaggcacccagaggtggttcggaagcacagtgggcagcacgtccaagatccgggagaggcaggagtggagggcggggacgggctcagcggcactttgcaggcgacaccaggatgtcactcgagactgaaagcatgaaggctgaaaatgtcggcagttccaggggacaggagggaagatgtgcagagtcgtttgagtcccctcccctcgtgccctcctctctgttttaatgacttctgcctgcgccctggcttggcgggggtctgcgcgtgcctcacttctgattaaagagactgagcagggatcatgctcttccagtagcttgtgcccggcagcttctctgggtaactcgggtcccctcaaagctttctcatggccctgctggagactcagtttgccctggttcagtgtctcttttctgggtttggtaaatagaaagtagaaatgagaactagtatctaacacatgtctgtgttgcctccagaaactaagtgtgatggagagctcaaaatcacacgccgcagagccagtcagatcacacccgccagcctgccttgcatccagctctgcgctgcacagacagccacgaggggaccgcaacaaggaccacgagcgtctccgaggggctgtgagagacctgaaggaagagcggaccgcgctgcaggagcagctgctgcagagagagtaggtcctcccaaggccccgccagtgtccccacgggcacaggtgctgcagagagagtaggtcctccccaggccccgccagtgtccccacaggcacaggtgctgcagagagagtaggtcctccccaggccccgccagtgtccccacaggcacaggtgctgcagagagagtagatcctccccaggccccaccagcagcctcaccagggaagcagctctcactccctatggaaactgattgttgccggggttaaacaattgtcaatttggaaaactgttcagctcgtagtagtcactgcataaatatttttatatgattctaaaactgcttacattttggtggtaaaataaaggcagctttagtgataaaaagatactggccgggcacggtggctcatgcctgtaatcccagcactttgggaggccgaagtgggaggattgcttgaggccaggagtttcagaccagcctgggcaacacagcaagactccatctgtacaaaaaatttcttaaattaactgggcgtggtggctcatgtctgtagtcccagttactcaggaggccaaggcagaggatcacttgagcccaagagttcgaggctgcagtgagctatgatcatgtcactgcactccagcctaggcaactgagtgagacctcaactcaaaagtgtagggaacggtgggagagcacatttaaatctctctaccctgaattccagaggaatcttcaaattgtctgttagagaggaattgactttcattggtttatgtaaaatcaattcgattttatgcagcatggtcttaattcagtaatatgtttatgggggatatgatctattaatacgtaggaaataaagcataaatgctccagcctgacgcagtggctcacgcctgtaatcccagcactttgggaggccaaggtggcaggattgcctgagtccaggagttcgagaccaacctggacagcatggtgaaacctcgtccctacaaaaaatacaaaaattagccagttgtagtggttgaagcctgtaatcccgcctatttgggaggctgaggtgggagaatcgcttgagcctgggaagtcgaggctgccgtgagctataatcgtaccactgcatgccagcctgggtaacagtgagactctgtctcaaaaaaaaaaaacgaaggaagacataaatgctatgaaatagttggtgtgaccacagggctgggaaggcagggcctcaccgggggttctggagttccatgacctgtggccgtggaacacccggcctggctcctgtcctcctcctgttgatagctcctcagggctcggctccttcatgaatcagccacctccatcatctttggaatgatgtttctctctagtttgcaagaactacagtgactgcccctcagagtggcctgtgaggccagcagcagcaacaagagctaggagctggttagaatgcagccaccgaggccctaccccagccttcggaatcatactctgcttccagtgggatctgcgggtgattttttttttttttttttttttgagacagaatctcactctgttgcccaggctggagtttagtggcacaatctgggctcactgcaaactctgcctccccagttcaagcaattctcatgcctcagcctcccaagtagctgggattacaggcatgtgccaccacacctggctaatttttgtatttttagtagagatggggtttcaccatgttggccaggctgagtctggaactcctgatctcaagtgatctgcctgcctcgacctcccaaagtgctgggattacaggcgtgagccaccgcacccgggcctgcctcggcctcccaaagtgctgggattacaggcgtgagccaccgcacccgggcctgcctcggcctcccaaagtgctgggattacaggcgtgagccaccgcacccgggcctgcctcggcctcccaaagtgctgggattacaggcgtgagccaccgcgcccggccctacaggtgatctgtgtgtactttagggactgagaaaaacttggccggtgcctcccggccagctacgttctctgctgcctgctgtgaacagtagaaggccaacccgtcaccactgtccttacccctcacgtgaggtctcggagtgcatttatgccaattgataggtcctttgtaaaaattagtatttcacgacaagcttttccaattaaacaatcattacagagttcatagacattaggtaaaaaacattaaggtagtcattatgaaaggtaaatcacttctggaaggatctgtgatgctgtcaagtggcgtgacaagagccacctcttaggagcccttaccgtgtgacaggggctctgcgaagcactctagggttgctggcatttaatacagagactcacaggccctgagcagtcggggctcgcagacagcatacagtccatctgagactcggacagaagtctccgtcgaaggccagtgtgtggccatcacaccgcatgggacgcaagaaacgcatctgggagcagttcagctggagccccgcacaggcagtgccacggtctaggcggggcaggcccctgccccattcacggaccccgcgcctgcctgcagcaccctcacacgggtgcgaggtccgtgccaatgagtggcggctggaggggcaactcctcattctatggcctgatggcagggccttctctggcttagtccggttgatcccctgcacacagcaggtgctcggttcagggcaggcagagccctgaggtctgtccttggcaatgtgtgattagaaatgggccttttgtgctcctcctgccccaccatccactgtcctaaggaagggctgagcactgtcattttctgaagtgccttcctgctctgacataacctacagtttttgtgaacgctgacgagtctcctattcttgtgtgcagtttggaggtgaagcagctcctgcaggcgaaggccgacctggagaaggagctggagtgcgcgagggagggcgaggaggagaggagagagcgagaggaggttttgaggtatgtgacccgggtcagggctggagaggacccaggcgagtccgcactcctgctaccactgcggccccccgtggcgtctcagccttgctgccagccggcttcttagaaaggccacacctcctcacagtctttcatggttttctgtcacccagcccgggactaacctcttggtgctgagcagggcctgccctctggcatcgtggccacctctcaggggcgtcctctgctctggctgtgccagcacctgccccttcccaaccagctgtcacactggcctctggtcagaaccacccaggtgtgggccacatccttaagaggggccgcccgtgccctcacagtaatgccattcgcgagagccaggaagcagcgcccaccccacggcccatcaactgctggtggacaaacaccctgaggtcgaccacgcgtaggcgcagagtggacggaagccctgaccggcccggcccggggaccctggaaaacctggtgctcggcaaagaaagccaggcacaaaaggccgcgtagcacacgattccttgcgcaggaaatgtccagaacgggcggacccacgtgacaagtgctgctgctaggggctgggaggggagcgaggactgctgacgagcatggcttcctttctggggcgatgtaaacgttctggaattagagaggggtggtagctgcacagcattgtgaagatgctagaattcactgaattataccctttaaaatagtgaattctatgtgatgagtcttaactttttaaaatgcacaaaaaactaggttagaaatctgagcagacatatttagcactcagaataattagtaagacatagactaccggaatgaagaaaactgtggccgggcacagtggctcatgcctgtaatcgcagcactttgggaggccgaggcgggcagatcgtgaggtcaggagttcaagaccagcctgaccaacatggtgaaaccccgtctctaccaaaaatacaaaaattagccgggcacagtgacaggtgcctgtaatcccagctacttgggaggctgaggcaggagaatagcttgaacccgggcagcagaggttgcagtgagcagagagcatgccactgtcctctatcctgggtgacagagcgagactctgtctcaaacaaacaaaaaaaaagaaaacatttcattttcaggagaaatctgactgaattctgtcagaagacttgaattaaagtaaatctgaaagggcacatgtgcagaaatgaatttttttttgttttgcctttagtacctggaatgaatatctaaattgcaatgccttctgttcatactgtttactaaaaccccagtggtcagtggtccctgcttatttatctcaaatgcttgggctcaagcgatcctctggccttggcctcctagagggttgggatcacaggcgtccggcctggcctcctacttacttatcattcacacaacggattctttttttagttcttagttgtttcaggagaggtgctgggccctgggggtcctcagccacggcctcgtggggcttccagcccagagcaggagacaacaggaagtcccggcctgcgatggtttctggtgttgtcaggtcatagctggagccctgtggctcagggagacatggccccaccagctctctacaggctgcctggtgtccccctgtctccgcctggaccgcccgccccaccctgccctgtgccggccttcatcacatagtgacaggtgaggtgtctcatcttttccctttccgccttagagaggagattcagacacttaccagcaagctccaagaattgcaagaaatgaagaaagaagagaaagaggattgcccggaagttcctcataaggtacagtgaccattcagttgagtctcccgtcaggtgcggtgagactttggtcgtgacggttctgaccgtttccctgtccagagttttttctgaccagccactgaaaatcccactcccctttatcatcaccattgatttctataactcatgtcgtgtgtatcgaagtccgggttttggattaattgactgtcagcaaattgacttctcgaactgatatttgagtctcaaggctggtgagtaaagagttttccaaatcttggtcatgcggagggtgtagttatgcggccggagctgtcactgagaggcaggaggggcttggggggaaaggacgaaggctcaaccaggcccctgcatggacctgggcatgcgtcctctcctctcatctaagttccagaacacaagttggcaaagcctcagcgggcactgccctctgggtggggtggggcttcctgtgccctccctgccgtcactcagctgtgcacgggttgaacgtggagtgactgttagcagggacccggcaggtgagcagggaccctagatggatgctctcctgcctctccactccctcagcgtgtgtggacgctacccgggggcagctagtcgcggcggcgtctctgtggctccgaggtccctggctctctgctgcctccctggagggtcgcagccatgctctgctcaccatggccggtgctgcacttgcctccctggagggtcgcagccatgctctgctcaccatggccggcgctgcctgcacttgcctccctggagggtcgcagccatgctccggtcaccatggccggtgctgcacttgccttcctggagggtcgcagccatgctctgctcaccatggccggtgctgcacttgcttccctggagggtcacagccatgctctgctcaccatggccggtgctgtacttgcctccctggagggtcgcagccatgctctgctcaccatggccggcgctgcctgcacttgcacttctggtggtagaagggcgtcctcacaaatccccttccagtgggtaggaggatccttcagaaggcagatgtgagcccatgcatgttcagacgaaaagcaaggaacttggtgtcaccatcctgaggctgcagtttgctctaagaggagctcatggataaaaccagtagaagccaccacctatggtcccagctgctcgggaggcagcggtgggaagatcgctcgagcccaggaggtggaggctgcagagagccaaggtagcactgctgcactccatcccgggccacagatccagacccttttctcactaaaaaaagaaaagaaagagagaaagagaaaagaaaaaggtctgaaaatagaggagagagagagagagagagagaaaacaaaagtgtctgaaaacactattgaaatacagccttttctgtgtggtggggttataagcatttttttttttttttttttactttcttttagtattgtctgaatttttcgtaataagcatgtattagctttgtgttattttcctactcaggaaacatttctattttagagaaaaggaagagtgggattaattgagtgatcagctctccaagtaggggatcagctctcagcattcacatgggaatgattaattgtaggttaaatggagtgaggagagtcggtttaagagttgcctcaaggaatttataagcgtgtgaaaatttagacttttttagctgtctgtagttgtgtgagtaaatgttcatttatcttcggagaagctgattttcctttctgatcacattggcacaggccgcggactaacagatgatctcactttagcggaacagaggcctgaaaatgtgtcaggactgagggaagatgaggctcttcttagggttacaaaatcagaatgtggaagccaagggccggaatgctggtgccaagcaacttgttgccacagctaaagagatctggaaacagctggctgtgtggatgtacccagggcatcttcgtcagggatgttaagatgtgcagacacccaagtgaccatcctaggaagattacactcccaggtccctagaaacaggaggcagggcacgcaaggccacgcaggagcggcgcgtcggccaggaggcggcagggtcgtgcggaagacctgggccagggcctttatcatgagaaggagagggcgaggtgaggtgagccggctggttagggccggcgggctggaagcttgaagaatttcagcaggatctgggccacagggtggtcttcagctgtcccgcacctggccctgggtgattaaggctgagaaacactgccttctggagtgtggggcccaatacaggaggcgattctgagtatgggcaccagattagctgctcgcataggatggccgtgcccgaaggcaggcccttcactgtctaggaattggccaggcccagaggggcagcaaggccccagatgcccaagcatcgttaacacacagaaaatgaaaagccagagcaagccgttctgtgtttgttgaagtctgtggacaggccacctgcgcctggcgcctggcccggtgtgcactgggagcagtcttgtgtctccctccggggagggctttcagcaacagcgtgctctccaccgagcttgcattcttgacacgagaggccttttcatttgtattgggtagtgtcctatggatgatacatttggagtcatcagtgttagaaatcataatttttcttttttctttttagagacagggtctcactctgttgcccaggctcgactacagcggcacaatcatggctcactgcagctttgacccctgggctcaagcgatcctcctgcctcagcctcccgagtagctgagaccacagtggtgtgccaccacacccgggtattttttaaattttttcatagagatggggtctcgctatgttggccaggctggtcttgaactcctgggctcaagggatcctccctgcttggccccccacattgttgggattacaagcatgagccactgcgcccagcctgaaatcatggttatttcaatggtcgttatagcaatcctggcttgtttctaccttaaaaaccatgctagaaatatatatcaatcccagaaatcccatgtttataatttagagtattaaactagaaaacagaaaaggaccccagaaaaacagacaattcttgcaggaacaaaatgtgactgagtgtagtgagtgtgtgacggccgtgtgaagaagcgtcctctctccctcccaggaggcactgccagacagagttaagggagtttaatgagaagcacgtctgcacttgtgtgctcgcctagacgctgtctctcagcagtacaagagaccgctgtcatgtggtctgcagaccagtgtggaacagctctctcctccacattagtgagactcacctgataagcgcagccgcaccatgccgggtaatatcctgtccccttgccggatactggttgtccctgccctggcttcattgtcctcttactccttcaatttcctgcaggcccaagagctcccagctcccactcccagcagcaggcactgcgagcaagactggccgccggattccagcgaggaggggctcccgcggccccgctccccctgctctgatgggagaagagacgccgcggccagagtcctgcaggcccagtggaaggtgtacaagcacaaggtgaggctccccggggcgacccgggctgctccctgtgagtcttcgtgctccaaggcaagccactcactctccaggaatgactgggcctggagggccagccaggccccaggtgtctgagcaccgtaacatacagaaaatgaaaacctcattcacacgctgacacctccgttctgggtgcgttttgtgcagtagtggataactcgccagatttctttccatccagttttcttccagaactattcgaaagtaagttttagacgttatgaaacatcggcatgtatcttctaagaaaaagtgtcttctcctacctgaccacagcaccgtgactgcacctagggctgccagcagttttacatcctcacctaacggcccttcctattcacatttcccaaatgtccccatatgccgcctgccgctatctgtttcccgccagcattcggtcacggcggttctcagtccacatcccatcggagcctgggggtcggttggttacgtctccttagtgtggttcacagcagcccccaccctttcttttctttaaccaacagttcaccctgaccgattttgtttgtttgtttttctgagttagagtcttgctctgttgtccaggctggagtgcaatggcatgatcttggctcactccaacctccgcctcctgggttcaagtgattctcctgcctcagcctcccaagtagttgtgatacaggtgctcaccaccacgcccagctaatttttgtatttttggtagagacaggatttcaccttattagccaggctggtctcgaactcctggcctcaggtgatccacccatcttggcttcccaaagtgccaggattacaggcatgagctaccacacccggccttttttttcttttttcatagagacagggtctcactccatcactcaggctggagtgcagtggcacaatcacagctcactgcagcctcgacctcccaggctcaagcagtcctccggcctcagcctcccaagtagttgggactacaggcaggcaccaccacacctggccaatttttgtagagacgggtcttgctgtgttgtccaggctggtcttgaactcctgagctaaagccatttacctgcctccgcctcccggagtgctgggattacaggtgtgagctaccacacctagattttttttcttttctttttttttttgagatggagtttcgctcttgtggcccaggctggagtgcagtggcgggatctcagctcactgcaacctccgcctcccaggttcaagcgattctcctgcctcagcctccccagtagctgggactacaggcacacaccaccatgcacagctaatttttgtatttttattagagacagggtttcaccatgttgtccagactggtcttgaactcctgaccccaggtgatccacctgccttggtctcccaaagtgctgggattataggcgtgagccactgtgcctggcctttttttttttcttttcaaagacattttctttggcaatgggcaggccaatgtgttacagaacgttccctttcctggatctgtttccttgtggggtcataaacttattcctctgtccccttaatttcccataaatgagaaataaggtctccagctctgattcacccgggtttgcttttggcaagaatgtctcacgtcgaggctgtgtaccccatcccctcgggacgtggatggaccaggccggcccctgtttgtgtttctaacctggccatggctgctggctttcgccattttaaagaaacgagtttcccttggtaactggccggcagtctacaggggagagtttagctccctgaggtctgtccccaccacctttccccttgtggtcttagtgtccttcccgtcacagctgtctccgtctgaaaagcagtttccttattagcggggccaactcctcgtcctcccgaaagcgtgggagaaaacttagtgacttccctttaggtgctaagcagatgctggcttgtctgtctgtctcactcttattcagtgtatatatttctttgcttccatcgtatattctgctggtccttgtactcagttcctccttaatctcccaagggaaagatcctgtgtacagtagtacaaatgtgggacgtgcactctgatgtacctgtcatccggccgtggtggtcattccgtgccattaagtgcacattgattaacttggcatcaacatctggggaggacttcgctcacatctataagaacacatgctccgagggaccctctctactgattgtgacgctgcgtgtcagctgcagcctgagaaacttcccaagacacccaagggtgactgatgaccagtcagggtggggccagtgatccagacccctgaaccaaagtccccttcataacgtccccagcaggcagcctcagcctccgagttctggggcttatccagagagcacagtggtccggacacctgtgctgtgagagagctctcacattgggcccacatccacctccataggtgcacagcttggcctaatggagtcccttctgcacagccaggggactggcacacggcacagagacgtcccttcatctgcagcttgggccacctcatgtgactcctggagaattcccgccatcctaattctgcctctcactttcgtcctccttacaaaggcgtttgtttgctgggtcccggcagctcgggagggaggagccagggcagccaggcctcttgttggcttgatggacacctgttggcaagatgaaggaatcaaaaccacattcatccttctcgtgttaattcatgtattttttctttctttttttttttccagaaaaaaaaggctgttctggatgaggtaagcgaggtttatttcttgtttcaaaattcggatttgtattttgttgaaaagtaggtgaggggatatttaaagatgtgttgattccttttctttttttttcgagatggaatctcgctctgtggcccagcctggagtgcagtggtgcaatcttggctcactgcaacctccgcctcctgggttcaagcgattctcctgcctcagcctccctagtagctgggattacagggatgcaccactgtgcccagctaatttttgtatttttaggagagacggggtttctccgtgttggccaggatggtctccaactcctgaccttaggtgatttgcacatcttggcctcccaaagtgcaggaattacaggcgtgagccaccgcgcccggcaagtccttcttttcatgaaaccaaaccagaccccaacgttaagtataaaatacatgagaaatagagacatcaaataaatatttcgataatttcccactttcaaaatctcttcattcattccttccttccattcattcattcttttcatgcacactcactgatcaccagccctgcgtggggcagtctcagaggccctgggacgcaaaggctcaaacacacaagtgaacgagtggttacagcccggggtggcgctgggggtggccagccctgcacacaaaggccaggaggtccctgcgaggggtgacatgcaaggtgggcctcgcaggatacatcagagctcactggaccgggaagtgaggggagggcatcccagcagagccggtgggacaaggagtctgagacggggccagggcatggaactggaatggaggttgagtatgtcacccacagctgagaactgacagattgatgaacagtgcagttccagccatgaccctttttagggaggagctagaaagtgagatctttattttgctggagtcctggtggcctctgagatgctcccctctcctctagggccccttcagggacagcagtgtatttccacttagactgcaggagaggaccccgcctcagtcactcagagctggcgctgggccacagggcttctcacgctgccttcctcctcacccacagctgcttctaagtggcagggcagactcagcacccgcttgtcctcacactccccaggtgcatctgatgtcagcagggttgacagctctgccgtcagggcggggcttgacttccccctgccccacccatgtccccttccccttggccacattactcatccacaagtgtttgctgggctcctgccatgtgccgggcaccagaggagcttgtaacagaccagccagacactgtccaaattgcacggggttcatactctgcagtcaggacagccagtatggtcgcgggtgtgggcggcacaccaggctcagtggcctgcgcgcagctgcagtgggagcatgttgccatctgatggccaggccacagccacacgagcgccctccacgagcagacagctggactgcccacctggcccaccacactgcccctgaggaagggacccctgctcgccactgccctagtcctcagccttcggttctgcagcccctccgtgcctggcctcctggtccctagacctgccccacagacacacccttgtccatacccatctcacacatctgcaatggcaacttccaacatccccgtctctgacagtccctcccatcctccagcagccctcaggccctcatcccgaggtctccagcatgtcagcctcccacctgtccacccaccacagcctgcccaggctcccggtccccacagcccgctgcggttcctagcacacgcccctgcctggcatctcactttgtggttattcttgccagcctcccgtcagaatgcaagctctgtctttttgccaccacacctctggtgcctagactggcgcctggcatgtgggaggcatggggtaaatgccctccagtgagcgggtgaggggatccgggctccttgtccgatcggccagtcagtggtgggtgccgtctccccatcctgcttctctccctggcgccccccatgcctcaggggcctcgtctctaagtaaagacagcagtgaggctgcctgtgtggggctgtggtgagcgtggggtttgccagtgtgtgcgcagtgtgtggcgtgacggagatgcgtgcccctctcacccctccggctggtgcagagcctcccgtacctggcagccactttaccggaagcttctgggcagcctccacatggtcaccacactctggcgggtcgttcaccgttaatagccggcgctgcctcgccctcctttgctgagctcttttcccaccctagctttaagacaaaacaaaggtgctttctgttccaacagcggcaagcctgctaaactcacgtggcatggggctcggtgggcatgcttgtcattcttctaacgagtttgagagatgcccatctatcaggctgggagggttcacagggctagaggcagatcgttcaaaaataagtgcttccccgaaaatggagtgtgaacttcttacggagcttccctgtctttttttttttttttttgagatagagtctcactgtgtcacccaggctggagtgcagtggcccaatcttggctcactgcaacctctgcctcccaggttcaaacgattctcatgcctcagcctcctgagtagctgggactacaggcatgcgcgccacgtctggctaatttttgtatttttagtagagacaggtttttaccatattgaccaggctggtctcaaactcctgggctcaatggatcttcccaccccagcctcccaaagcactggatgacaggtgtgtgccgtgcccagctaattttctgtagagacgaggtcttgctgtgttgcccgggctgatctgaatttcctggcctcaagtgatcaccctgcctcagcctcccaaagtgctgggattacaggcatgaaccactgcacccagccacatagcctaagaaaatcatttcaggataaataattctcttaagatcacttcagaggtcttgtggccccttgcttgatttagaagacatctatggaaagtagatgaaaccaataaactattccaacctgaaaaaacgctccaacatgaaaacctaaccatgtgtgaaataccagctcctattagccgctgaaagggactgcagtgagcagcgggcaccttgccattcccagagtccccactgtgctgacaggtgccatgccctgtcagctccctggggcgccagtgagtttctcccagactggggtgagtgggagcacggacggctctttgagagaacgtggctgcacagcagtgaagggagtcacgttccctgctgccgtggcagctctctcctcggcgcctccctctcgcccgccgttgccccgggcactcacacccacttttctctccctgcttccttccctgacaggcggctgtggtgcttcaggcagctttcaggggacatctcacgcggacaaagctcttagcaagcaaagcacatggctcagagccacccagcgtgccaggcctcccagaccaggtaatgtcggggtgctggacgtcccagtggccatctgcagagctgctcgtctcgcactccatccatcgagaaagcgtagggcacccctcagcctccacatccccgcccgcccagcaggcgtcccctgcgctccatccctggccacgcaggccatgcaggcttctctgcgcaggcccctctgcacaggccccggatggatgtggcgttagggccagattgcgttaagctgccggagagtcaagtagctccatgaagatgtagctaaaaactactaaagacagatgcaggccattgcggcccctcctctgtattgaggaccaggtttttgtttaagaatccctatagtaggccgggcgcggtggctcacacctgtaatcccagcacttttggaggccgaggcaggtggatcacaaggtcaggagatcgagaccatcctggctaacatggtgaaactctgtctctactaaaaacacaaaaaattagccgggcgtggtggcgggcgcccgcagtcccagctactcaggaggctgaggcaggagaatggggtgaacccggaaggcggagcttacagtgagtcgagatcacgccactgcactccagcctgggcaacagagcgagactccatctcaaaaataaataaataagtaaataaataaataaataaataaataaatagataaataagaatccctacagtttaaaaattcagaacctgccaccaggaggctgttcactgaccagcaattcccgggaggcagggccatctgaaaaggaaactgagctcttcctgtctccctgacgcccagggtgccctgggggttgagtgctgggagccagcagggggctgccaaacagtcgtcttccctgctgtccttgcaccccagagctctcctgtgccccgcgttccgagccccatcgcccaggccacgggcagccctgtgcaggaggaggccatcgtcatcatccagtccgctctgcgggcacacctggcccgggccaggcacaggtgagtcagggtcacggggacgtgggacacagacatggcacgagaggctgcccaccgcactgggcccggagcactgggtgcagggcatgtggcggaaactggagcagcgcctgccgcctgccagcgggacctcggtttggagccagagtaaaggcttcacatcctgaggactccctgctgcaccacggacgtggagtgggctggaaggtgtgatcctcgggggaggcctttccagagtcgcttcttccctaccgggaggagatgagaagaggagcttcacacaccgtgtagctcaggtcaccatcagtctgtggcctggcttttggctgtgctgataggtcatccctgtgaaagaaaactgtgttgtgacctccgtgttggacacggcatatgacaggcgacgcgtgcagggtctagatggcagcgttcccacaggcctcttggtgggtttgctaggactctcggttgcagaaatcaaaaccccttgaagtgagcctggccggggggagtttacagtaaggggaagagacggccccgctccgtcacccccgtctgcttcaccccgcatggggtttgttcccctcttatcacagactgctctggttctcagcctctgtggtggagccgcgcggccacccagcacttccgagtgggcagtttctccctccaaggccgcatctgcatctcatggtcctgaccccatgtgacctgggacacactgtgggctcaggagtcagggacccatccctgggcggcgagccccagccaggaggtggagggccatgcagcctgcaagcatgtccccggggaatggcagctgggctgacccagacaggagacagggaacggagccgtctgaggccagcttataaaaccatgccggcctgacctcagcatggtccccgaggagatggacggggacgtgtctgaggctcttcaccgccggacgtttctggaccctgggtgcatattgggtacagcgctggtcgtggggctcgggactggctctgtgtttgctttcattggaatacttgcctccaagcaaattactgaggctgctgtaaacctcagagaggtttgtactctctaaaagcagaatcagctggcgttttctgtttttttccagtgctaccggtaaaagaaccaccaccgcagcttctaccaggaggagatcggcttcagccacacacggggacgcctcctccccacccttcctcgcagctcttcctggtaatttcattcatttggattctggcaccagggcagctggtctgctgaggtctcagccaaagagtggccacctccaggaagcccgggctgtgtcgggacggaagggaggagtgtcccatctggagctgcctctgaactaagcgtcgccttatgccaggaaggcccacaacagggccccgccttggcccagcttgtcctttgtgcctggaattgccgaggtccttgctgtctttattttttgctctcagctccaacaggaccgaggtggcttcctccttcaggccagcatttctcctgtttgtttgttgagtaaaaccgtgttattgtttccttttctactttgttaaagtccaaaaacagtcagtgaagaagccgctggcactgcaggatgccacaccctggtgtgaggcctcatccctgctctgcccggagctgacggggatgccccagcaggccctgcctttctctggccgtcagtcccttcatgtttaaagtagagaacgggctagacagctggaaagccactctccaccccaaatctatgctgctctgcgtggacttgagatcccgtgtcttatcctgcaattagaaaccccccattgacacctcctgtaaagggaagatgagtgcggaggcacgctgttgagactcgggactgtcgggagatggagaagggcagccttaagaccctgttgaggaggggagtgtggcgtgcggggctgtttcacgtgggaagtgtcaggcgaagggctttgctgtgctgagtccttaggtctccagggtggagtcagggaaggaggagagagaacagcaaggaaaaccacaaaggaagaggctcttctgagcccaaagggtgagggtgaggaaggccagggggtgaaggaagggtgaggcctgcccaggacccacatgccttaatttgaatgtcccttcaggacgggcccagggagccggcagccccccagtaccactccagtaagtgtgggggcccgtggcgggcggaggcctcgctttcctgggagatccctcctgtgctgacgcggagtcacggagttgggaagaggccgttttgaggcccgcatcagacctggagcccgagagccttccctccccagggggtcccgctaggggctgtgttttagagagtctcctgcacgagctaagaaccgtataccacgtttgacctggaaataccacgtatgaaatcacattttattttcattttttaacctagtttcgtcagagctagaaaactttgaactttgatattctctccaaaacttccatttgtaaagctcaacacaaagatgagcagcctggggtttcggggagaatgtacagacacgcaaagcggtcgggccggcctgtgactcgtgggctctgcaaaaggctttcagttgttctccgggagccgattctaccggcttcgccagaccctgcctttggtgacctttagaggctttgatcagggctaaagcgtgcgttgatgctgcccttttctcttgctcaacgcaagtgattttaaagacgcaagttcatccccgtgacccagggattcagctttattgacctaaggaaatgtctctgtgaaaagtataaatcaagcttttgtttgagctgattggttgtttttgaagataaccatgaaagctgtttttaatttcataaggttcccctttaatatgaattttcttgaaagttgcaggaaaaaaaagctgacacagttacagtatctgcggcatggccgaattgccatttccttccctttttaaaatctcacatgagcagttcattacttttttactttcgtctttcaaggcagcgacactcaggctccccggcaaggagctctggggctgctgctgtggtaggacccgtcccttcttcagctctggtacccacctccatcccgtctgtaggtggcgtcccattctagaatggattaaaagtttggaacgctctagatgcttaggaaggagcatccaagggggaatggccgagcagcttgcaagctcacagcgatccgtgccttgccccctcctgccctctataccagtggccagcgagttaacagggaagttggcttttttttttttttttttgaagtgcagtctagctgtgttgcccaggctggtctggaactcctgggttcaagccaccctcccacctcggcctccagagtcctggggttacaggcatgagccactgcacccagcagaaacgctcctacacacgggtagccacccacccaggccccagactcctggactgctgctgtgggaatggctttcagggaatgactccagtgtggactcgaggttcctccatgctggcaaatgtctgcttttgcaggtgttttgactgggggaaatggtgagaatactcagagctgagtttgaaggtgaggagagtgaggctttctggcaggtgtgtaagttggtcctgaggctggagagtgaggctttctagcaggtgtgtaagttggtcctgaggctggagagtgaggctttctggcaggtgtgtaagttggtcctgaggctggagagtgaggctttctggcaggtgtgtaagttggtcctgaggctggagagtgaggctttctggcaggtgtgtgagttggtcctgagggcggagagtgaggctttctggcaggtgtgtgagttgctcctgagggcctgtgtgccccatggcttactgcttctcggggtggctgccgtcttgcctgccggggaagagcagacagtgtaagggtgtccgtggtggcagcccctgaggtcagcgtggctgacccctctccctgtggttcatttctgcagacccctctccctcagggccacaggccttggcacctctacctggggatgacgtcaactccgatgattccgacgatattgtcattgcaccgtctctgcccacgaagaactttccagtttaggtccccgtcactgtctccacgccgtgatggcagcgctgccgaggacataggaaccacgactggaaagataatttatcgtgttaggagaagaacgatgatacctacttaacacctcagcatctgcgtcgtgtctctttgtgcttttgtttgtggaaggagacccaaatgcctttactttattctctggggagggccagcggctcgcatccccctcatctccagctgcagctcggatggtggattttcagtgccaacagacacatctgccgtgaactcgcagatgccagggagccctgtagtgacacgttctctgacagcaccttgccgcctgcccacgaccttgaccgtgaggagctgctatccgcaaccagcgccgacaccatgccccctcttcctggtgacaccctcaacaaccaggatttgctcgatctcagcccagcaggccaggcagacacaccccgctgtgccttaggaaggtgtgagaccggcttcccccatccccacagcaaaacacggcctgtcccaagccagtgaggagctaaagacacccaggtccccaaatgatcttactccatgccccacccgctcacaccgtcctttcccgtcacccttgctatcccctggagcactgccctccagagctgcccttcccaggaaggaatttggttggattctgtcactgtggagaccaagattttttaaaattcccaattacaaaagcagcatcacacttgcttctgagaacagcagggtgatgtctgttcccaagctggtggcgggagccttagcctgtgtggggccacccggggaagaggaggagaggagggtgaggaggcaggctcgccgttccaagggacagcataggctcgtggtggggcgtgttgcatctggtgtctgggacagtccccgtcaccccatgtgtgcggcctctgcactcccaagctccatggctgggctgggctgggctgggctgggctgggccgggcgtgcggagcctgtggagccagcagctgcagaggcctaggagggagttcctgggggaagcgcacagtgtccagtgcccatctcttgcttgtgtgtgagattagcccttgctggggcgtcaagaggaagagccttagacctgggcgggccttcaggggcatctagacccctgcacagcccaggcctggtgtctgcatttccacagcacccctgtggggactcctgccggggctggccgctgtctcaggagagacccaatggttagaaagcccctttttacacagctgacagcttctcccaaggcttccgtccacggggacaggcttaacccctgggcgccttttctgcagcatggcggccttctgagtcacctaagctgagcctgggtcattctctgtggcggtcagaaggccgatggccccaacacagtggcttgtgaaagggagagaggaggctctgcatgtccacctgctctatgggaggaggacacaggtgtccccagcccagcctgttctctcccagtcactcagggatggggccacccaaagtgcaggacccgccccaccctgcggttcgaagcctggcccctgtctccacttagcttctgtttctgcagtgggtggaagcgagtcagcggggggcctggcttgtgtacgtgttttccttatttggtctgtgggttgccaagtccatttttttttccactgaactggctggtaacttgatggactgtgtaactgacacaggccctctttagacccctgccttcaccccacccgcccgggtccactccctggggcgctgtcccaagccatccctgcttgccagctcaaagcttcaggtcctaggagccagtccacctcgaaagccctgagaaagtgagacacctgcacattcgctgggggagaccctccgttctcttgtggcagctgctcccacttgttaaaccaagctgtttctgcgggacgtgctcactcttgggaaccagtggcctagagctttgggttacaggcatggagagggctttcctgcctcaggcttggaggccaatgttccatacataaaccgccatgtcctctggtgcagctgggctgctcttttaaaagccagcatccatcttgaagctcgctgggtaaatggcaatgcattctcaagccagtgtcttcagctgatgcccagtgtccagtgctggtcaccagtcccctttgctgggtacagcctgcctggctgttctgtggtcctggaacgctgcagtgtggttttgttccatggagacagtaccaagcggagaggcctccttgcccacggccccagggcctgggggccaggggttctggccctgcggggacttaggcaggaggggaagagaagcccatggagccatgggaggggtgagctgtgggcggggcctagtcatgggaggggtgagctgtgggcggggcgagctgtgggtggggcctagccatgggagaggtgagctgtgaatggggctagctatgggtggggtgagctgtggacagggcctagccatgggaaaggtgagctgtgggcggggcctagtcacgggagaggtgagctgtgggcggggcctagtcatgggaggggtgagctgtggatggggcctagccatgggaggggtgagctgtgagtggggctgagccatgggagcagcaagctggtggagtgggctgggcggagctgtgggggctgctggcagggcctaggaaagtagacaactcccgggggagacgaagtagagagtgagtccccaagaaagggactcctgccccagcgtcaagtgccaaagcaggccccatctaccacttcagggtcgacgttggtggcaggtgttgttcacggtgtactgattgtcactgcaacacctccacatcaccttgaacttcaagaacagcagcaaagctgtatctgctatcagaggctgttaggtagtccagctttaaaataacacactctttctctatcccatgccctttaaacaagcagccacaggagatgtcagtctccagggcctggccccactgtgttgacagcagtcacgtctgttgagctgacactgctgaggctgaagctggccccgtgcaggtggctggtgagccacaggtgcagtacccggaggtgtgctctcccctagaggcctgtccccaactcctcccctagaggcctattcccgctgctcacagacctcagcagaggcaccagctggagggctccagggacatccttggagatacaggaggctttcctggcacagggcacagctcttaggaggcctttgtaggacgctgtctccccagcgtgtcctgctcatccaggatggggagaaagaggaggaggccccaggctcagaagccagggacagactgccgacgattaccaaactgaatccaggcagtgccatgaccctgggtgtcccttggttcacatcacccaccagacagctgcggagagagtgcagggaggggctgggaccaaacaggccagaaaccagcagaaaagaggcagaagtgaggtgggtgtgcctggggcacgaagccagcgccggggggatttcagtggagccttacagccaggctccgtgcggactgtgatgccagagaggcgtgcagcctctgggcaagtcgggagagggcttgggtggtccccacaaggcagaagaggtggaagggccagagaagaccaccaagaccaccgttcccgcaggcctggggtgagtgacctgactgagactagcgggcagagccaagcagggctaaactccaacccagggcccggtgttggacaaagtagctttttctttgctcgtttgtctgtgtattaagaagagactaaaatagccaaacgacgctggtcgcatgcgctggctgtggtctgtctgctgaatgtctatttttgtctcctgacgagacgtgaggaccatgcccttgatccctccgatggaccagaaacccccttccttgcaaaaaaaaggcaattgaattaggaaaagatagcccaacctagctcagatccaccaagataagcacagcaaagcttggctgcatttttgaggaataaaaacctgcagaaagcaccgataaccttcaagatctgaatgagattctattataacccgtctaaacgattgcaaaattcctcctttggttttggaagcagcgtttgctctcccgtggctcggattctctgaggaccagggagttgacacacaaaccccgccatgggtccgagccagctatttctcaaggctcccacctcgccaagctcccaagggcctgctggcagtgcctacgctgtgccaactaccctgtctggtacagaccacggctgggtaagcacccttaaaagcaacagaaatgacgtctggaagctgaaatgtgaaactgtcaagatggcttaggagaggaaggagtggacccgctggtctttggcattttgtatttagaattattctaactttatacataatgtataggccgatcttttggaagggataaggttttcattcttgtgcaactcattattctcattattggccttttaaataaaaagttgttttgcagtgtgccttgagtgccccgtgaagacttctctttaatgacctccaggtgtgttcctgccccacgcactcgggctgaacaaacgatccgcttcagaaaccccgcttctctgggcttctggcattttgccgtggtcgtaatgcaggcttggggttggagagccagctggagggacgggtcccgccgccagctccctgccacgcatgaactcggatacatctgttgacaccccggtcccccgtcgaatatctattccttagatatgaggacacaaaaatgtgcgtgcgtgagggagttatttctccatatttgatttcatttttgtttcaggagcagggaaagaataatttactgaggaatcaaacacagatggaaacgaccaaaaggagctgatatctgggttttgttttccaatattttgttgcatagaacaaggagcatctgtggctttgtgtgcttgtggctgcctgccctggggccctaaatcctgagtggagtttgtccgaagcctccacagttactgtggttggctctggcatttgcccaagcctattttctctctatcgatcttatatgtgtgtgtgtgtgtgtgtgtgtgtgtgtgtgaaaatatatgtatatttttaaattgagatagggtcttgctgtcttgccctggccggagtgcagtggtgcagtcatagctcactgcagcctcaaactcttgggcttaagcaatcctcttgcctcagcctcccagatagctgggactataggtgtgcaccactgtgcccaaccactttttaaaaaatttctgtcacgcctgtaatcccagcactttgggaggccaaggcaggcggatcacgaggtcaggagttcaagaccagcctggccaatatggtgacaccccatctctactaaaaatacaaaaattagccgggcatggtggcgtgcgtctgtagtcccagctactcgggaggctgaggcagaattgcttgaacctgggaggtggaggttgtagtgagccgagatggcgccattacactccagcctgggcgacagagcgagactctgtctcaaaaaaataaaaataaaaattctgtagagatgaggacttgctaagttgcccaggctagtcgaactactaggcccaagtgatcctcccacctcagcctcccaagtggctgaaactacaggtacgcacctggctaatatacaaaatttgaggggtggggcacagtggttcgtgcccgtaatcccagcactttaggaggctgaggcagtgaatcacctgaggtcaggagttcgaggccagcctggccaacatggtgaaaccccgtctctactaaaaatacaaaaagtagccgggcgtgatggcacatgccagtaatcccagctactcaggaggctgaggcaggagaatcacttgaacccgggaggtggaggttgcagcgagccattgcactccagcctgggcaagaagagcaaaactccgtctaaataaataaataaaattttattttggtggaggttg

SEQ ID NO: 283 - DNA, 179075 bp, Homo sapiens
  source 1..179075: mol_type = genomic DNA
ggagaggaccgggtttccgctgcatggggctatacggtgaagaacatggtcatggagggcttgcagggctgggctgtcagaaacaccaaggggacatgggtgcccagagtagaggtctgggctggagatgacatgtggaagccaggggcatggagaaggtggactgaaaccgtgggcttgtgtgagggtgcctcaggagaggggaaagggaggaagagggcttggacttgacctaagccacacacgagctccgtggaggaggactggcctgcacaggagactgaaggagtctccagagagcagaaagggcacatggcccagaggtgcccgggaaccagcatttcaaggaggcaggcacgaacagtcacagctgccgaggggtcagggaagctaaacatgttcctgggattcggtggcacagaagtcacatgcagccagggaggaggaagaaccatgatctcaaggtctgagtcaggtgtctcccagccagacttaagtgttaagggaagtgggggggatgagcaaaccggtttccatacgttttttaattatgtcagtgatcggtattctcaaacaccagctgctgctggtggtgtgacctgaacccctgcctcttccagccatccattaattttcagatagatgcatgccgacaagcccagtcctggggctgtcactggacacacacaggcggatcatgcagctcacaatctcagggcagggggagacaaacacaatccccagaagatcaccgcctcggagccctggcctagctcacctacctccagcagctcctgggctgtagatctgcgtagtaaaaatcaaaccctgaggcagaaccgggtatttcagggaatttttgtacccagcttctcttgaagggcccctgaatagtctgtaaaagggatggacgcccagttgcagaaacaggcattgtgcaaggcacttgtgtgtgtgcactgaaatggctggtttcctggtttcagtctagatgagccagtagtggctatgaatgagactggaagagggggcccctgtgagaacatctttcaatcagaatgtgctgtacggagggagggccagagttcattttggtcaccaaaattaacttttttttgtttggttttccactagttagatctgccagttccttttatcccatgcactgaaagtttaaagtggtgttctcaggaattatgtttggccaggaaaggagaaatcgcagaagccaattacatcctcacaggccccttccttccaggagaatgactttaccatcttggcttttgtacatgatatgagccaacatggaaacgcaggctgctctgaactcctgtcatcatccatctttactggggactgggccactgggtatttttttccctaagtcataatcagtgtacctcaacgcttaatagaattcatcccctctaactccatgaaaggaccatcacttgttgaaagttgctagaaattataaatacctttgaaaccttctattggttgtgatgtgtccctttattttaaattttgtatcagtgtcctcagtcagtccaatgtcttcaaggaaagtgagtgcccagagtcacaacaagtaatggggaaactcatcagctggagatctgggtctggccaacagggcaacttctggacttttcagaaaaagtgagaatccgagagtttcaaaggatttatttgatttccccacatgatcacaaccatggttttacattgatagagtctgttgccactgacaaacagaatgcagatgaaaacaaacgcactcctttcctctcaaaggtacacagtgggggtgccaggcttcttgtgagggaggtgtcccttgaagtctctgaacagtctggggattcaggacctgattctaattgcttaaaacaactcggaggcaaaagatattttccaagaggagatgcatgctgtgtgcagtctcgatgtgactgcacacagaagggcgatgcagatgcatctgaatggagggcaggcctcctccctcttgtcctgtgctcagcacccccacctcaccctgctcagtgttgcaatgctgccttgactattgttgttacataaaatacaaatgtactcgtttctcaggcaggaagggtgatgatattttacaaggagaactgtaagactgtgcgtgcttacctgcgggcacagagcttcccgtggcgctgagtcaacacccagcatcagctgtgaacatctgctgtcttttcagctcattaagaaaaacaagaggctcctgctgcatgcagtgtgtgagggaaagatcactgcactgggtgctgaagacatttttaagcaagatgtgcacagcatattaggatgaactttatttttacattgttgtacaattcattggtaaacttaaaaaaatacaaatacatgatttgattgttgtcccagaaaagacttttgtcacattgccagctgtttccctcagcgtctcctgctcctgtcagcaattctgtatgtaactgcagtaatttgtgtgacttgagaaaggtgtgccaagggcgtcctcacagtgagaagggaccaggcagacatcctggggccctcggcctcctcctgcctcccctcccaggggatgtgatgacaggaccccgaagctgtggctctgacaggtgggatctctaaaggggacagtcccatgaaagacacacggggacaccagctcactgggagcttttgctttcccaaacaagatgtgggcagcatgactccagcctctggaacccaacaatgtatcttccacaaacttttgataagcttgcaaataaaacagaatgaaacctcactagcctgaaggaacacactgagtgcggcgggaaaccccgggaagggctcagtgggttccagcagttccttacgcgaggccctgctgcccagcacagctccaggacacaccgaggacagtgccacaggctggcagcccgaggctgtggagcttgcaggatggcgatggagagggagagtttcctgaaagcccctcctggggttttctgtctgttcctattcattactgctacccttcagaaagagcaattctgtgccaaacggcctgaatcttttctggaacaacctaaaggttacagttagactctcctcccagcacagaagagggtgagaaaagctgacatactcaatatgtaatcgctttacttcaacgatgtgtttacagtcacgccaatacattttgcaaacgcacaacacgcagagcgcagcctcacagctgacgccagatgacatgcagcagtttaacgcttccaggtcggaacagcctcctcaaaattgcgagacagagtgctttggggagcctggcttttaaaaaagacccgagaattgatgagtcggagacaccagggcgcttccctgacagcccagcctggacccaatcacacggtcccatgctgtttctttctgagcagacaccaaagaaatgccacgccaatgggaggacacaggtgggcgggttaaagtcacatttttaaaaaggctaaactctagattgctgtatttgctctctctggagattaacaaagtgcttggtttgcagatttgctggtacggtgatctcaatgatatgaccgagggtgggagggatgtgaggagggaaatcggcaaaaccctggccagccagccagccaaggtgacacacagccagagggggctcccctctcctcctgccgtccggccacggctcaccacgctgtccactgggaacgcggccccgcggcccgcagagtcaggcgtgagcttcgccctttctgaaagggcctccgcctgggcaggcgccggggggcagtcctcgggtcccatggcttaggagcacagcactgacggctgcagtggctcgaaaggctgaaactacaaagtatggcccgtgggtgactcgggcacagacctgccgcgtgcaggtctggccctggggagcgcatggtgtcaccacaacacagaagcgacaagagcacagctgagagtcatgtgatgccctggcagctcactggaccatgggaaggcagcgggggctccgccgggcactcgtcggctggggtcacacgggccacggtgaggacacaggggttctgctagcacatggctacatggaattacggtgatcactgctaccactcagaaaacaaaacgggaaacacacacaccgccctgggttgctaaacgctaaagtcaaccttcaggttcgagagtggttcctgatgaaaacactctctgagggcttcggcctggtgtgggttggaggcgggatgaggacgttatggtgttggggagacgaggatgagagctggtcactttcatgttggagatgaacacttctgccgtgtatgggtgcccctctcggaggactctgaatgagtgtgcgtcaaatcatatgcgcataaaagaaacatggatcatggagagtcacagttatcgcagccattaaagtgtctaagaatccgtgtaaccaatgtcctaagacaaccagcttgtaaccagctgtcctgagttgctactgtagagtgtactgcagtttagctatttgcttacctgaaataacagcattataatactatttatgatagtattctgttaataaaataaggatttatacaaagcaatactggactttttaaacagttagatgctatgttacttggcacagttagtaatgattgtgtaaagattttagccagtcctagagggacttctttgtatgaaaatatgaagtatctgaatttgttcctagcatttagggtttggtctattgtctcacacacccagctaaggtactgtcttcctattaggtaagtggagctccttgtaaggtgggtattgctaatgtggactgaaacgcctgcctttcacacacaagtactacctatacagtatatatatatatatatttatatatttatatatttatataaagtttacttacgtattttcatcaaccatatcaggtctacttatttttttgcccattgtcaataaaagagcaataatgcagcaagttttggggtttgttttgtctgtttttgtatctcatttcttcgttttctaggttgggttttcatatgcatgtacattagggcacagggagctgagagctggagtgggggaggcagttcaacactacttggctggctcaccgtttcaaggctgatggtgtctgaggcccacccatccctcagactgaggtgagcagagcccagggtgccaacaagaaatgaaatctgggcctttgttccacacaacaccagccctgtgggctcctggggctccggttgggccgtgaggggcagaggggagagatggcaacagaagtgccccgggtttggtgtgcggctggcgacccccgggcgtgccctgtgtggtgtgcaggtgtttcagggagcctgggacccctacccaggctgtctacacaattgtgctgatgccgctgggtttggccttgctgctggtggggggcggcggggcagggggctgcccatggtggtgcactgtgtgccccacgtgggccgagggcagcggcgggtggccgtgggcatgggccccgtaggctgggtggcccccatgggggccgtggtggtactggtgtgcgtgctggatgtgctggggtgggtggtggtggtggtgatggtggtacgggggagggttctgcatgtggcagtactgggtgtgatgcccgtgcatggcggcctgcggcagcccctctgggggccccaggtggtggccagccacagagtgctgcaagtgaggcaggaccaccggtgggtgggggggtggccagggctggggctgagggcaggtgggcctggggagggggcttccctctcttgctcccgaataaggagcccaggagggaagatgagttgggcatagtctggtgtgggcgagatggacactctcgtgttgatgtagctctccggcgcatgtgaggactgctaatgatggacccctaaaaaggaaattcatagaaatcaaaattaaaagatcttcaagcacttaggtcagaatgatttttttttttcaaatgtaaaaattcacccactgactgctaagctttagttcaactcactggccagagggtggggctcagtgaggctggactgggccccgcctcctctcactacagtgcagggcagctgggggttactggccttgaccaaagtggggagtgagggcaggggaggggcccatctctctgaccaccacggcagaagtaggacttctggtctcattctgacaagcactttggccctggcagcagcctgagatttcaaattggaacccctaggttggggtgtctgtgcgctgtgtgtggcgagtgcagaggggctgatgtgcctggaggaggagccctgctcctgctgaaaacagggccctcagctctcctgggactgctcaactgggctgagggcatgtgctccgcccatgtgggtcctgaggtctcgggggaggtggtgacagggacaggtggggctcagaaaccttgtcctctgggagaatgggctgcctaggcatttcactacagctgcctactacaaaccaaacaaggaaaaagaaggtaacagaaaaagatctgcaagctgaggtagagatgtgaacagtaatacagagatggccggaggatgagtgaaatatcatgaaatccacactgaatctctttctctcaagacactcctcctcccacaagctaagcaattccatggtgtcctgccgcagacacacagcaatcaaactccaagaagaaagcgatgaggatgggcgggcgtggaagtcaagggttcagcaaaaacatccaacagcaagtgtggagggtgagtgggagccgggtggcccgggcgggggtgccggaagctggggatggtcaaccatgctcagggaccacaggtgatggggttaagcagaaaccaaaacacaaaatccagaaccacccccactgttgagtccaaaacaagcggtgagaggcatggatatttctaggcacagaggagaagctgacatgcacagggttccaggcaggcaggggcagggagtgggtgtctgcatctctgtgcagtaggggaaggaaaagccaaaaaaaaaaacaacaaaaaaaaaaccaaaaaaaaaaaaaaaaaaaaaaaaccaggacaacagatatgaactgaggactggggaaggcgacacaggacagccagctggacagaggcgcttcctacttacttccacattgctctctagcgatcccgcactgctgcgacgccctcgcttccctgcccagaacatgcaataccagaagttagacgcggacatgaggctgggggtgctgcctgcctggtgccacgctgctgccacggagcctgcacccctgctgggagcaggcacaggtgccgggcccacctgcccgcaggagccaggtgtgaggggtcggaggaggggctcagtggggaagccagcagcagtgcaagaatgaattttaaaaataaagttttcgaaaagcaaaaaaaaaattcttttttaaaccagccccaattttgtactcctcctggaccaggagtctgttgagagggaccctggggctgaggcatgtgtacaggtgggcctgacgcccccaacttgtgtgttcacccctgactcgggtgaatggggaggggtgagggcagcttccacatagctgcaaacagcatggcaggtactgcatgcctaccttcagtgattgccatatatatgtgtatatccgcacacacacatatatgcccccacctccttggcaggacgagcactgagggtgaagaggaaacaacttcacatccccgcttcctcccagctgcccgcaggagctcagttttggtttgtgcagtgccctggccaggggcaggagacagggttggggactgccggaaaccgccttccagcttgggattcctctgcttggtaccaccccccaaaggggccacaaagccttccctaagccaggaggtctctgccagcatcttcgtcacgccccagcgcagagcacacagtaggcactcggcatgcggggtccgtcagagcaaggccaggtcttcctcttggctctgggtgcgtagggcccaggcccggcctggccccgcccagcctccacagtccctcctgaggacttctccgtggattttttgaggaacaccaagcctggagcatgacgggcccagctctctgggagtggggatgggaagagggagagagaaacagtcctccccacttgacactctagaagcttccatctgggcagcatcaccatgtattgagcgctgcgctggacatgtcaaccctataggcgccactgtgtccatatcagagagaggaacactgaggcccaattctcacaggcagcagggttcacacccagacctgctcacccgaccgcctctaaggctggataacttggccatgctgccttcagagctggaccctaggccgggttgggcccaggagcctggaagaaggaagcaactgctgggcctccccactgtgccccgtccccagcctctgggaaagctactgcacctcccagctagcccaaggccaccagccagtgacaggtggaggaagtgctgtgggcttcgagcctccccgtgccatctgaatgtgctgggctgtgccttggcatggcttcggcctgggcatcacagcacagactcaggggagtccagttcctctgccttgtctgctgaccccaaaccagaggtccaggtgggagttggggtcagcaaagggctttgggtggctctggcttgtgtgacgtggccctcagagaccactactgggaaagggccacacggcacatcagggcaagagggctcaacaccagttgctgaagactaggacagccaagtagaaccttggccctaattctcagccggaagtaagaggaggctcacatttccttatttttcagccagtgtgggaagaagggctgacctttcttcccttcctgcccaacacagtggtccagggacatggagcaaagtagagtccagcctcccaggacatggcctccctcctccacccccctcttgggtggccacggccatcagacactcaggacattgtggcgccatgtggaaatgtggagggacagagcgccaatgtctctaggttttcaaatcagctctctagcctacccctaacgcctgggactcctctggctgactaaaaaccagggccagaggggagatggcctccccgtctgtaaccggcaactccttctggctggcctatagcttctgacaggacctgggccagccctgaaggctggggttgggggtccacatagtgtccccacctggagttgaacatggccctccttaccctgcccaacttgggtgaacacttaggagttccttacttggctgttttggagtgacgctgagtgtcttacaatctactttctcaatgtctcaggtcagcaagagatgcagggtgaccccagggctccctctgtgctgagtcctagagccctgtgctcacaggtacacccacaaccataactgcccacagccagccgtgcagatatcccatgcgtacgcagcctcccacacctgccctggttcaccggctgatgaagtcaggcaggccagaatagtggctcacaccacacacgtgctgatcaggccaagccagccctgggcagagcctggagggacttggaaccatttttcttgaagggctcccaggatgattcttcacaaccttttcagcttcctcagagtcagggcagggcgtaacgtggcagtgctctcctgcccacccaggatcctcgtcctgtgaccctcaacaatgctgtggttgggctggtggccttgctcagtgtcagtgaccataacagaaatgatagctatgcacactcggccggcgctgcctgagccaggcatgcctgaaaggctttccatgcatcgactccttcgctgcagctggggaaacgggcccacagggtctgaccgctagagagggcaggcggaggtgggggatgagctcaggctgtctgattctggcatctgcgtgctgcaccatgttctctgctgggcctgacatggtggggagggatgtggccagggcaagaggaagcaccaccctctctgggccctggcctgcttcacacgtggcaggggcgcttctctgtccacccaccactggtgcctgtcactgctcccctgtaacgggacatggagactgctgcaggcaggtcctctccgtaaggactcagagctgggcagcttggccagggaggggcaggagggccgctgggggccactggtcagtgtccatcaccacttggctgaaccctgtttccacagtccttgctgggtccttggtcttgggtcagcaggactcttgtgccgctggaatgagcaccgggtggggagtcttagcccaagggagaccagggctgagacgccaggcaatgcactgcagtggggccggcgccagcccccttccctctaactcttggcacaacagaggcttctgcagtctcctgaggatgggttccttcaggcaccatctacggccacttcatcagtcccctggcttcatgtctgtggtatgtcctcctttggatggatgtcgagtgcagacctgggacagctgctctcagggtctcctgccccaggagcagtgacgtgtcaaacatggaggggacactgtccgcaggctcacctcttccacaagctcatcgtggtgtttcaggctcagtgctgtgagggccgtggtgagtgaggtggggccatgctgccgctggggagcttgcagcccccatctggtccagagcacatctgacctttcctgctgccagccctgcccctccccaggaaggctgccagcacctgcctgtcccgatgggagatcacaggtggcctctccccagcctggggcctcggcagctgcctggactcaaaccccacctcgcttcacccccaaacctttcggggtacaggggggtccctgagatctgttcctccttttgtttcaatggcaggcccagggtggggtctcagtccctattgtccgtctgagctcagaattcccaaatgacaacagcaatcgtcacactacatgaaagcagctggccgtgggcccacccctcacacgaacctggggccggcacgtggctgtccaacccccaagctctggcagagggtggacagctgaggtcctgactgctgggccctggggcggatggcgctcaagggcctcggttctggcagaactgctgctgcctgagaggggctaagggaagggagagggcagggcctgtcacactgcacaaactcaaacggaggctctagcccacagcctgcagaggcccaaagcagtccagtgacatttagctgtgtttcacaaggccactggggaaaccagtggttctcaaccagggatgattctgtcccccaggggatacctggcaatttctggagacatcagtgactgtcatgacagggaagatattactggcaaccagtagtagaggccaggaatgcgagtaaacatcttgccaagcccgggacggtcccccagcaaggagtcacttggcccaaaatgtcaatcaagccgaggttgagaagccctgggttcaaccctcatgctggcaactggcaatgaatttctgatttttttaccatggcaaataataataataatgacaaaacgaaaacaaaggaaaaaatccaacttaaagggcagactccaaagggcctgagagggactaagctgaggggaggcaaggctgctgacgggcaggtgcgggagggagtcctaaggtggggcaggtggggcaggcaaccccaggaatgggggggtcttcccaaaacaggcacaccaggctcctggggcagacctgcgtgggacaagctgggccactgcagccccaggcagtccccggggcccctcctgggagaagctcgctgactggtggacagactgttcggcggagggcggctacgataccctcccgtacactccttgagcagcaacacagcctgcagcggcacgagccggcacccaccggtcggccagtgcctcttttctctcctgccccacaagggagagcctgggccacagctgctggcaaaagcccctgagccttgctgctcccggtgccccactcccaggaatgtaggcagtttcaggggtgctgcttgcttgggggttaaacagctggcagcaaattaaacacacacagaaacaaagaaacaaccacaacatcacagttcccaccagggctttcccggaccccggagccagccctggctgctgctcaatggcctctgggctggacgaggcccgggtttcccaggagaggaggccccgcagggaaagcaagaccggggacagtgggcaagggggcgccagacagattagagggttccgcgcaagttcattcatcagcatgaagcacagggacgcggccgcacagagagcacgggacacagccgccggctcactcgggctagagcgacttcccagatcaataaacaagtaaataaaacccctggaagaagaaagggaaaatgggggtgacttccccagctaattcgtgtgcaatgcctttctttttgacgtttgggtcctgtttccctgtgtctttttggggcgccctttctgtatgtcacacgctgctctgctttgcggaaggtcaggggaaatgccgcactggcttcgccgcaggccctgccccgcgtgatgcatgccctgaatgcagacgccctgcctcggtcttgcatgcgctgggctagcaaggtggttctaggccaagctcttaccggcttccgagaggtcccgcagggagctgctgagggcgctgcgcttgaggccctcaccgctggcatagctgtcgtccaggcaggcccggctcagtgttccgttgcccgactcctttttgaggctagagcactgggacatgctgggccgcacgacgcctttctgcttctcgagctccgctggaacagagagggtgagggtcctggtgagaggagcacagcctagagtgggcaggagacggggccttctgcttggagctagcactgtcctgagccaccatctgcttggaatggggaagggttgtttctgggaaagagggtgtgatggccaccctggacaaaagagcagaaaggagatcccaggagggaggctagagagaccagagggccttgtgacctgcaggaaggatagtcaccttccaggctcgggagtggacagggaggcacagacttgcctgggtctgagagatgagcaaagattagccagggtcttccacagagagggcagtggtagggagtcccatgtgcctccaaggagtagacctggagccagggagtagacctggagccagggatggccttggctgtgtgacccatcagtcggttgagcctgatgcagaagatgacgaggtgcagagaggccagctgggaactctgcgggctcttgcgcacgggatgaccagagagccagggtcttttgatggacatacaacaggcaacaggtagggcgggtcctggattggactccctctgtgcctcctgcagcctgggaacacagactgccccatcatgtggccatagggaaggccagaaaagactgggggacatcttgtctctgtgagctcagaagtcactgccctgacatggggaggcaagtgccagagtctggcaagtctcggccttctgtccatgaggcctggtactcacactctatcctgtgcttctccatctcttggacttccgcaatggactcccgcaggtcatcggtgaatttcttccggtcttgagggttgggggcgttgaagtttattaacactttgatatctgctccggggacagacgaggtgagccggatgccattggggtagtctgcaaaagggaaggagaggggaggaggcccacgggtctcagtgtgttctctgcaatctcctctctggtcaggaaacaatggtagggctgagttgtgcgtgagcctgggataagtgccgggagtccagcctccgcagtggcaggctgcaggggtgcagagcaacctcatctcccgacttgggaaagatggtctgtgtcgctccacatgtgactcagggacaaaagtggtcgagctcaggggaggctgctggggccgcgtcctggaggaggacagaggttgcgtcctgagaaaggtgggagtcttctctagtcatctcagttctggacagcagtgagcgccatattctcccgaatggcctgtggcccacagctcccatggggtgcactatgggcactccacagccaaggaaccctgtgcccagacctgcctggtgccacctccgggctctcagggtccctggggctttggtctcctggcggtgctgctccggcagtgggagtcactggcagagcatcagccactggatgtttgaaggttcttggaccaagtaccaatcccaccttggctcagaccaggtgggcctgtgggcagctgcagagtgctcctgtgtgcatatgtgtgcacatgtatgtatatgcagcccattactgccacgtgggaacatgtgcctagtgacaccaaaccttctgattttcagagaggcccaaaatatctacattttgatgtagagactggctcagcaaactttttaaaaatatgcaaaccatataaaagataactgagctgggcctgcctcccaggctgtcagtttgagacccctggaatgacggcatgtcctatagaagctgcaggcttggctcttgccagcacccggcacccacgatctaaggccaagccctgggaccatagacatgatccaggtgcagcctctgccctgatggtccacagtggtcctggccccctgctgggagctttgctgccaggatctcactaagttcccaccctagccctgggcagcaggggtcaatgccaccatctcagagagcaggctactgctggtcaggacaatgtggggatggcactggcctcccctgggaccaaggcaaggcatgacttgcagcctgcgatgggacaggaatggcaggaggtggggaggcggccagggcaggcatgccatgccccttgttgggcacgtggggagcagggcatacagggagtgcagggtctcctaccgggctgtccctggtcccactgaagactgaaggggacagagagccccagatccaggcgcaaggcctgtggttttggatggtccagctgcaggtccctgacactgttctaatccgcagatggaaggctgattagacagacagtgacacctagttctgagaggataagggacccctactgctcaagcacggacactcagcttctttccctaggacactccaggtggccccctgctccccagcccaggaggactggctcagcctccaacagggaagggacaaaggagggggaagagaagccgtggagagtgaaaggagcaaggtaaaatggaagccagtggggtgctgcaggtgtgagcctcccaaactcccaggtccccaggcctcacccagggccttccagcagggcatcaaaattaacccttgcaaagcactgtgttccggcagctatgatgggggccctgtggcaggcactaccttacaacccaggcaacagaggccagaggggttgcagagccaggccacacagcagttgagccagagctgggatctgacccaggctgaggggctcagttcttcacttccgcggacactcatgggttgctgtcacctgtgttctgggccatgtttgcatatcacctatgacttaatgtttttctatcaacatttacataaatgtatttctgccataaatttaaaaatcttatcacctgcaagaaacgaagtaccagtaaaagcaaactgagtgtctgtccagtgttattacatgaggctcagctgactgatgggcctcttgagggtctgtgcctacagctcaccggagctcctagctgcaatctgctctctggggataaaacaggggtgagcgtcgaagccccccgcggttctgtcctcgaagcagccaggagaaagagcgtaagctgggacatgcgctcttccaggcaggccctgggggcagacttacactggttctcgaagagcaggacctgcatgccgtacaaggagaaggactgtcggaagctgtacgtcaccgagttcttcttcttctggaagatcttggtgacctagaggcagccagagacagagctgagctacagtgtctcggggggcactgactatgtgggacctctggtcagaggatcctcctggagttcaaagtcaggaggacagggacaagcccacgtgagtggagggcatgggcttccactccaagactcggacaacggttcctgtccccgcaaccccgatgccatcttggctggcaacaaagccccacaacctgacatagaggcggtaggcacttcacagcacggagccccctcaagtgccttctcacagccaggtgaggtgtacacacccggggcttggcaccttgaggggcaggaatggacaggtggtgctcactagcgctgaccttggtaagaagccatggcttcctttctcgggaacaaccagagtgtgaagctatgcctggtgatggcctgcagggagactggcccctgggctagcgacgtgatccctgaatcccagctggcccgccacggtccttggctgctattctggtctacagtaggaaaggaactttccagtgtggcagccaaaggctgggctgggaggggagaggggagctcacatctccccggtctccagggcatgccaggcaccatgtaaggtcttacgtccaggacctcactggacccctgccaccttctgagagattcatcttacagaggaggaaactgaggctcagagatgtgaagggattcgctcaaggtcaggagttcttcataaaggatttgaacttacacgtctgatttcaacatcagtggtcagagagggttagccagtcctcatacccaatcaagaacatgggcctgtagtcccagctactcgggaggctgaggcaggagaatggcgtgaacccgggaagcggagcttgcagtgagccgagattgcgccactgcagtccgcagtcccgcctgggcgacagagcgagactccgtctcaaaaaaaaaaaaaaaaaaaaaaaaaagaacatgggcatctttggcaagaaagcccgtggcatgcaggggtacagaaatccaaaggacaagctctcccttctctctgcagtgggcacttctgcccccgtctggctagcatccatgccacctttttttctggcaagagctccccagtttccttttggggaaacctccagcccttgtttccttcagtccataggtcttgcagggaccagctcagggctccaggaggtggggcttgggacctaggcctagccaatcagaaagcactgcacctgcctggcctggagaggcttagggagggatgtgcagcgacaagcgctaactctgcaacctctgctcagtctaggaagaggattctacagttgctcagcagacaggatcaggtctggagctgctggggccaccttccccttcctggacagagcctgtctgaggaaggggcctgcccgaggaagcgtcacacaaggtacaggtgcagacagcacacaggagtgctgctgacgttggcagaggctctggaaacagctggtactaaagccaaagatctccctctggacctgtgcatgagccaatgaagtctgtcttcatgtgcatcagtgtgaaagacaccaggcaaaccctcccttttgcacccccacatgcatgcacatcttccccacgcagacagccagacatggaccctgggctcaggcttgaggtccctgctacaatgccttgtgggtgagccacataccaccaggaggtcgttgaacaggaagatttctcgctggtgtagtccgagtttctggggcttgtttgggtctggaacctcaaagagccggcagtagcagaccaaccgacggtggggcagagagagcacctgtgtgggaagaggctgtcctgccacggccgcccagctctcctctaggagccctgggggccgcagtggagaagtctagcccttcaagctagaaacccggcacgtgggccttgagttaaaaaatgccttccctcacagacattgaagagcagatacgtcttttggctcatggcagtttcccgtactctgttctcaggagccactatttaaaatcccgtatctctgctctcctgaaggactagggacgtgccccagcttctgctgagacctcctttccattcttttgggcaggtaccaggcttcttaaactatcacgttcacctgggagcctctggccagacagcgagtcacattttgagtccccacaagtgccggtcataaacatgaggccactcagccctgcaaaagtctttacagagagaatctgctctagatgaggaaaaactgaggcacagaagtaacgacaaaactaggaagtggcagagccaggatccaattccaggccccaggacttttcccacccaaccaagcctccccataaaagattcctatggtcctgatgcctgaaagactctccaaaatcctgagccagcagccaacactctgtggcacttgccctggacccgtcctctgctccccacagctaccctgaacatgcccctgacagctcacgaaagctcccaacacggtcatagctccagctgcccttgaggcccaatgcctcagggcgagggatgagccatcagggcctggctctgggagtgcccaggttcatgcaggatgggggaggcggtcaaaggggtgggatccccgggatcaccgtcctgaggccagaggcttgactctaccaggggtgctctaggccagggctgcctgagtttggcacatctgggggttaagatgagggggaaaatgtggcccagcctggggtgcttaggttgcaaaggtatgaaggagagaggatgggagggttcggggagcactggctggaggtgggaggggactggtctcttgcaggggaagctggggagggtgagggcaggcagagcggctttcaggactgagggacaaagccagtccacaaggagggtcatggtgagcagcccagtcaccctgtgtgcatgtgtcctggggcgtgtgggcacaccacaaagctatggcagaggacgggtcctgggggtgaggaggcaggcactgggagagcctggggcatgggatgtgggggacagagcacagagcagggccaggtagcggacagggcagggcctcagaggacacaccggggtctgtttcaggcgcagggtctgggggctgggctcaacagggcgtcaacaagagggagcaggagtctcccctgacagcacagcctcagggcctgcagagatctgaggctggggtaattacgaacatctgattctcagcaccccagcaatgaactcaagcagccagcacttgggctctgggagcctggggagccggcggactggctgatgctgggcctccccagggcggcgggctacccacaaaggtaaaaccagagaaatactcacacagccgagcccgggatgcagggatccgatctgcgggagaatgtgaaaccaacaaaagggtgttcatgtttcaaagccacgcccaggccaatgctgcaagtgcccctccctacacctacccttgggatccacccagccagtatgtggggtacccactctctctggcagagctctctgaggggtcccaggggactcctggaccacccaggaaagcctgccagtgtcgggtgcccagaactcagccactgcacaaccctggcctgctagatcattaagagcctcagctctcttcagattgtaacgcagagccaatagctgttattcccaaatatgacaggagacactcgaaaaaaccccaagccctggcagaattcaccagccctgctggaagagaccacacggagtggggtgggtgggagtgagaaggcctggcaggcagccccgcccgggtggtgctggggcccaccacgtaccagggcccatcacataccggctttttccccacaatgagcttctccaccttctgcacctgggacacatggtcctcattggtctttagctctcgcttacggatccgttcatagatccccatcagcatctcacggggaatgtcctcaccatcgtccacacctgggtaggggatgcagctggatatcagggtgggccccaggctcactcgatttaccagtttctaaagcaaatcagaggagcgaaccttccactagacccaacagaaccaaagaactcccaggcaggcccacagcaacaggacattttcagtcaacacaaatttcctcagtcctcctaccagaacgggcccaatacatccgacccggtctagtaggcgatgggtgtcaggggctgagccacctctaagccattttcagagggctttataaatgctaccctgctccatgctaaccacagcccttcgaagtgggtataatcatctccattccacagatgggaagactgaggctgacgtgtggggaggctggagtatagggaggctggggtttgtttgggctccgatggacctggggccacgtcctactttcacccttactagctgtgtgactatgggcgagtgactgcctcaaccatgcttggtgtcctcctctaaaacaccttgcccacagcacaggcttgttgtgaggaaacgaggggcgcctggggcgtgcccagctctgcatctgagcggtgggagtgctgcagtggttgctgttgctggcccacatcacatgggcagaggctggaggctgggctctgacccggggctgccctaaccacaagcacacactgcttctttcttcctccccactctgaaaaccgctgtgagcagagaaacagccttatacatatgggaaatgcaaactcgttttgcagtgagctctaccctcacccatccgccagactgcagtccaaaaggctgcagtgcttggggaacatggacctcccacagatggctggcaggacaggagatgctccaacccggggtaggcaacctggcaatgcctgtccaaatgacaagttctagcaccctctggtccactgactgcatttggggaacttatcccatgggaaatgagacacatacaacgttatcgcagcactgtttccaaatggcaaaaggctggaagtaacctgtgtacccattaacaggggagtgctcaatcatcccacatcagcacgacagactacttactacgcacctgccaagaacagtgaagaaggccacagtaaagcacatgggccgtttctcttagatttagtaagtgggaaaagcaaggtgcaaagtagcaggggataaaaccattcctgcatatgtgcacttgcatgagcggagcacaactagggggcacagccaggagaagccaaaatcgaggaacttcaggggcagaggctatgccctgagcaggtggggcagggtgggaaggaaactgctaggcaccttccagtattttttatttttattttcctaaatagacattatttttagagcaggtgtaggttctcagcaaaattgagcagaaggcagacttcccatgtatgccctgccccccgacactcatagccttccacgctgtcgccatcctcaccagagtgctccattggcacaatgatgagcctacacggacacatcagcgtcacccgaggtccatgttttagattggggtccactccagatgctgtgattctgtgggtttgggcaaacgtagaacgaccctcatccaccattatagcaccacgcagaacagtgtcaccgccctaaaaatcctctgagctccgcatacccatcctccccttccccagctcctggcagccactcatccttttcctgtctccatagttttgccttttccagaatgtcatagagttggaatcacatagcacgcagcctgttcagactggcctctttcactcagtgctacacacttaagtttcctccacatctcttcatggtcgatagctcacttctctttcgtgctgagcactattccactgtctggaggcacgcagtttatttatcccttcatctgctcaaggacgtctggtggttgccacattttgacagttttgaatggagatgctataagtatccgtgtgcaggtttttctgtgggcctaagttttcagttcttttgggtaaatatcaaggagcacaactgctggatcatattactttctggctttcaaactatgtgaatatccattcaaaaaataaattaaaaaatttaagaacaaactttaataacaaggaaagactcctggactggcttccgtggtgagctactccgccttcacagtcctccagcccccagggctctcccgctgcgggacccactggacaaactgcgctgacccactccagagaggatgtgtgttggggagggggtgaggatttccctacaaaaaggacaagctgtccatgcactcggcacagagcaccaggctggctccaggagtccagggacctgcctggcctcagccatttcttggttgatgtgaccctgggcaggtcccttccttctctgagccctgatcacccattctgaagcatgaggaagatgagaaagaatgtccctgagctctgggctgaaaaggggtgacttggtggggacagcccaggcttgggagacagaacctgcagctcccttcttgggaatggggtgcacagccccttccatgggaagtggggaggctcctgccaccctgtcatccagagaactggcagtactgggtgcaaccatggacaggacccacagagccactgccactgaggtacagactggccgccacctgactcagcagccctgccctgccaagccttctctactctaggccagtcatttctggttcctcctgctatgtctcatccagcatatcccagatgacgtgcaggaggttctaaagtaagaaaaaaaaaacctggccaggcacggtggctcaagcctttaatcccagcactttgggaggccagggtgggaggatcacttgaggccaaggagttcaagaccagcctgggcaacatagtgagaccctacctctagaaaaaataaaaattaaaaattagccgggcatggcagttcgcgcctgtggtctcagctacctggcaggctgaggcaggaggatctcttgagcctgggaggtcaaggctgaagtgagatatgattgcaccactgcactccagcctgtgcgacagaggaagaccatgtctaaataaataaataaataaatgtaaacaaattatagagaccctcaaactgtccctgggctgccagagggacctctaaatataaataaatacatgaagtaattaaaacaaatcagagaccctcaaactccccctgggctgccaatagcatgcagcacacagctggctttcctggaggcgatggccagcctgcatcaggggtcatgcggaggtctgtgaatcctagaaacaggcttggccccatgagaagggaggctcaggatgagaggccccgggtggatgtagaggaggcccggcctcctggctgctgcttggacacctgggcctgggagtacatgttgtaccatcaaagtgtccactggtggccctcgggagctctcaagctgccttggttcccaggaactacagacttgatggacttggggcctgcgatgcccctcagaccttgcaggaggccacgtacagtaactgctgggtgcagggaatggctgtccatgagctctaagccacgccccagcctgctcagcgccccttcctgcctcccaagggaggtggcagaaccactcaggtcttggagcctagctcaggtgccatctccctgaggcctctgctacctgggtttcctgccacagcggcacccgccaccaggggaaggggagggcacctggagaccccggagtagagctggagctgctccctggagagtgacactgttcaaggagaagggacggcagaaccgctgttgaataaactaagaatgaacagctttgtcagctccacacgctcttagagccaggctgtattcacactggctcttctttgctgttacaaatagtgacaacctttccaaggaaccctcagcccctgttttcaacccaccctcagctcttgcagccagggttcccacagggactgagggatgcggtgccttcctccttccttccggggaccctggggcacacaggggacacactgggctggcacagagccacttgggagaaggtcacggccttttagttcctttcctgtttctgatcacacaaggatgcctcgctgcctgtagactccgcaccaacacctcccagcacatgcccacctccctgagggcagggagccgggtctgcactccagtgccagcagccggaagccgcactgggctagaactcagcagcactgctttcttttcttgcaaagaaaagaaagaatgtataattactttctacatgtggcaaatgctactcattctccatttacagtagcgatatcaagtccccttttaaaatatatacttttaggtaaagacacaaagaaaaaggccagtttcatccttcaaggacaagctaacagtgtcaccttctctgtgaggaaggtttcccaacacctcgagaccccggcctgtgtcatgcagcctgtgtcccacgggggctcctctaaggcaatgctctttccagtcatctgtgctccccaaaggcccctccatgccagaccctggagtgccggagcacagctccccaactggaggttgcctcacgccccttacatctggggagggcctggctggggcaggtgctggagcaaatctgtggctggccgaccgcctgagacagctcacctcggaggttcttgatgaagtcctctagcttcattttccgctcgggcttgacattggggctgtacatgtcggtgttcagcaggatgatggcgaaggccaggatgaaaatggtgtctgggttccggaattgccgcaccaccccagggttgcagatgcagtagcgctggctgcgggccgggagggagggggtcagggccatggcgcagcaagtgacacggcccctctctcacccgctgaggctgtcatgtgccgctaagcctcagctcctgcttctggtgagcgaggatcacacctgcctgtcggagttggccctgactactcacttgccctcctcactctactgtagtccctcctacctggattttagccgggcacatggccgtcctggggaggactacatttcccagctcccgggagctcagagtagccacaccaccacattcagcccatgggatgtgaacacatgtgatgtgagtgcctgtaaggctgggcccctctccccgctgcctgcaatggggacatcacagtgggtgtcaggcctgccctccgggaccttgaggtgaaagcagccaggggcacctccacaccagctcagagggagaagcactctgccttgtctcagccatggctactgaggggcctcaggttcaacagctgtggaccgactgctgcaagaacacccccctgccttggagtcagcccgcttgccactcccgctgccaccccaggggcccctccactggtgacctcgtggaggggcaggtgacaagaggcagggacagagtagaggagccaggcaaagtaccgggactgaggctcaggagcccagcttagtgccctcccctccaggaagccgtcctggaaggaggtgggtgcaccttgcctcccgccagggccctggggttgtcctccctctgtgtcctcgatcctcctggccccatcaccagtgtggagcccagagggctgggtcagcagctgacctgtgccgcccacacccagcaccaaacatgcaggcttctacactgccagtctgcacgtgatcccagaatggatgactgcgtagtgaccgcgagctcactgttgtgtcaggaactgggctaagtgtgcccacatgtcctgtgtcatttcatccttgcacctctttctagggtatgtgctactgttattcaatttcacaggtgaagaaatgaggcacagagaagttaagtaaccagcacagggccacagagccggtaagtggtagagtcggtgactgaaccaggcatctggctgtctggcttgtgctccgagtcactgtgaatgagcaaatgaatgactagatagatggacttgtggatgaatgcagagcttggggggaattagaggaagagcattcagaatcctgatgtgaacagccagaatcctagcagtcgcaatcataacctctttcaacttcagtttcctcatcttcacaattaaaataatcggtacagtcttctccacccccaccacctcacaatggctgaaaggagcccgtcacagtgcctggaacgtaggaggagccagtacgatcacccccaaagcaacattcagggacacctggccctgtctagggatggtggggatgcagtctttggtccatcctcgggccctgaagctgggggacaccattcttccctgatgcagcagccccagccagcccgggccccacctgaacgcctctatgagccgctccactttctgagcctccccttggacacggatgtgcgcctggaatttcctgagggcctcatccagctccatggtagagaagtccatctcgtccacgacgcagctggaatagagacagacagccccgcataagcaccccttgcaggtgcgacacgcccagcccacccccaggtggtggtgcctgaagccctgggaatggaccgcctcctggcagggagagcccctgcctgactccgaccaatcagccaagagccctcagaatgcagcaaaaagacctccagtcttctggggagcccacaaagcccctggaactgtagggaagcgcgtgtgcctatatttatgctggcagttttcccagtggggcagagcatatggttatctggatcaaagcccttcccaagagacaagcatttttaagcacagccctcaccaggcacacagtggacgccactgtgagtctcctctccttctgcacggggttggggagtttgctgccattttcacagtgaggaaaggggcgcccagggtgttgactttcagaataagcctgttctcttgtggggagagtatcggggtggtgggctgggttttgcagatgcttttccagggacttgaaagggccatgcaccctcatctgtggggcagggcctggaggggcggctgatgaatggtctccacattcttcccatggccctgccccggcacacccttccagtccctcctatggtgacccctgaacagagaagatggagtctgcaccaggagccctgaggcaggctccagcttctggccaagctccctaatgatgctgcggtcactcccatggggcagagagaggcctggccacacagggcctgacccctctcccagggccatctccacatgggggcgatgcagctgctcccaccctcctctgagcgctcaaggcctcctggggcaacagccttggaggtgacttcggagcagtggggagagggcaagcagggagcaggcagaggatttgctgagcagcaggagcagcggccctgcagatgcctggtgtggtggcccgggggagccagccacttcctgaggccactgctattttctgacctgaggaaaacaatgtgcggatttcctaaggaccagggaccggcttggagtggggagtcggggcagcataggaatggctgcaggggatgggggtgggagctgggcatttaccaaggagctcatgggctttcccctggacctttcctcacgcctgcttcaaagaggggagggggcagtagccaccctaacgatacagcaggcttctccaggtgctgagcagggagaaagatgcccagcctgtgcatgcttggcagaccaagggcacagatattctgctggtgcctgccatgtgctggccacacttagcctcctgggtgtgggacggggactacatgagtgccgtgtatgtgagtctgcgtgtgtggggatgtgtgcccaggccagcccctcccactctgagccttggtttccccacccatgagacaaaaagggcgacggcaccctctgcctcctagggagaagcagcagagatggcaggcgtactggccagccccagggaacgtgaggcctcgtgctccaggggctgctgctcccgggcaccttctccccagccctcgttggtcccctcggctgcacatgggcagggctgggcggctagaagggactgcccctggatggccagcacttcaccctgctctgagtgctcttcctggcccacccttctggctcagggagttgggaacccatttttctgcaggctttcaagtagccgggagtgctatgctcaccagctctctgaactgagaagagctgtggaatcaggaggtgggggcaggacgcacagccccaatatcccagccgggagaatgaggcaggggcagagcgtggcacgggccgcccacggggaggcaggtcacttgatctgactccccaccactctccccaggggtgagtcaggagcaaacagggcatgcagtccatgcaggaggacaacagccaggccaggggaagaggccctgacgtccagctgcctgctcctgccagccctgccatgagaagctgcaggaacatgggtcactgagggctgtgatgcttggtgctgggttggatcaaccgtgcttagggatggagggaagggaggggccaagggtgcatgccagagggtgggcggacaggcagtggggttcgcatgtgggatggtgcattggagggcaggtgcccacctgcgtgctgggcagatgtggggcatctgcatgtgtgtgtctaggacttaggaagagagaaaggggggcccaccacatgtcccagcaagtagggtgggcctggccctgtgtgtgcccacgggtaacacagggtgcgtgagggcgtgtgtggaatcaggtcccccaccacccccatgcagaacttactcgagcacgtcacggttgaactgcttctgccggttgcccaggaactcgccgatcatctgccggctgaggcccttgcgctgcagcaggaagtgggccaccccgacgggcgtgtcgggcacaaagccacgctcgatgaggtactggactcccttctcaggcttcctggggtaggacgagaggcacactcagtcccagctgcccggccaccagccaggcacctggaggggatctccgctcagtggacggtcgacattctccctccctgcccacctgcaccggccttcatccctgtaggcattcaggggtctctagttccatctccagcctgggtgggaactcaagaacccaggctggcactggaagaccctgggctccaggcatcctgccctgtcccaaaacccaaatatgggggacctggtacaaacaccttcacctagactcacccagaccttgtacaaagaatgggctgggctggctgcaggggtgcttctgtgggagctggagctggaccgtcactcccctgccctgcctgcagccccttctcggctgccgggcactggccccaaactcccgcacacacattcagaactgggttccctgtccggcccaactccctgctcccctcagtgtgaaagccgccatgccaggctgcacttctgagcagactggaaccctccccgcctgccaacgggtaataacagcaaccacagcaccggcggggagaaatcgctctgtgccgccgctgttgaggcgccctgtgcacactaattcactcaattcccactccaggaggtcagcactctggttacctgcggtgctcaggagcccagactcgggagcccaacagccatataaccttccaggggtcctggcttcccctgctgtaaacactgaggaagtagtcagatgcctgcaacgacgcactcagtaagcaccgtaagaggtttctatgccgagtcctaattcatgggagggtgatgaaggtgcaggaaggcagcatttctagctggaggtcacagcaccagtggcagggctggccatgcagggctgagtgtgtccactggagaccagacccccagagcatgggtcattccactggctccagcttcttggtgcccaaggtgtgtgcagaaccaggcctgggcagggatgtgcatagggcacggcatgtgtgtcgtgggctgatggggcctagcgccaggccagagcacaccaggtctgcacctggccaggtgtctgtagggccaggcaggctgcagggacatggcactgaccttgctgctcacaccagccctgggagcaggccctgccccgctgtggcactccggccgtgtgagccctggcaggccccttctcccttggggcctcagacgtcctgcccatcttgtggtaggtctcttgcttggctgacctggcagggtggtcctggtggtcaaagggagagattgggccaggagtggtggcccacacctgtaattccagtacttcaggaagctgaggcaggtggatcacgtgaggtcaggagttccagaccagcctggacaacatggtgaaaccccatctctactaaaaatccaaaattggctgggcgtggtatctcacacctataatcccagctactcaggaggctgaggcaggagaatcatttgaactcgggaggcgcaggttacggtgagccgagattgtaccactacactccagcctgggcgacagagcaagactccatgtcaaaaaaaaaaaaaacaaaaaaggagacaggctggtgtgagagggctttgaagatggccacatgtgaccctgaaggatgggtgtcctctctggagtttgccaggccactcagggagctgtatggagccatcaggccagactggctccatgtccccttggacggagtcctcagagtcaccgagggctgtcaagtggttggggacaccctccagggacacgtgcttcctcaagagtccatgaggagcccagtgtggcttgggcccccttgcctcatggcacacctagaacctgtgctagggtgtaatcggccaggtcatccactaattagggggccgggcctgaccccttgccccagcaggtagaagtcagcattcttctgtccccggggtgggggggatggagatgaaaccggtgtccacctgccccataacctgcacagttcctggctgacagcagtgccctgcagacaccgcatttccatgtgcaagtgaaaggaagcctcctggctgcaaggtgaccctgctatttttatcccaggatggccacacccgtaagcttgtccccaggagtgtggcagggagcagacaccagccagcttggtcctggcacagaagtggtaatggagtggccccggtccctacctgtcccagggacccaggatggaaggaccagggtttcactattcacaagatcacatgcctcgctatgattcgggggtctccaaacaagaactgctccaatgccccaggcctctacagccaaggccagagcagattctgggtcctcaccatcctgctccatgccagcaccagcccacacccttctctccctccctcagcttccaggtgaggggtcgccatggctcacctacagttgggttttctttggcccacacactgttaacaaaaagaattctagttcgttgccagtatttaaaaactggaagagtgcacaaaaaatctggatttctggcttctgaaaaatcagaccttctggcgtccctgggcctatgctccctggcctccacggcagtgagtgggggagccgggctaggctccccgacccctgctgcctggtcccttccccacacaggtgcatgctctaactccacccaggctgtctggtcccttccccacataggtgcatgctctaactccacccaggctgtctggtccctccaggccaccgctgcagtgaccaggtccaggcccagccgggtcccgccttctgccgctgctctttttttgcccccatccaccctctgatgtggatgtgccacatccagggacttccaggacaaggctcctcggccctggaggtgctcagagcacagagggaagaggggaaggtgctgtgggaagcgggcacgtgggctcttcaggattaggtgagcaccatgtgtctgctgggccaggcacctcttggtgaacactggctgggagtaggccgtgggcccctgcgggtgcagctgagaggcctagtctgtgcagggggcaagggacagagactgaggtatcaggcaattttctgggaagaggtgacagtgaggacaaaggtgctgaggtgggtggggagacctgagaggctattccagggttgagcacagggaccctgggggaaggcgaagggggtagtggggcggtgggcagactgcactgtacagcaggccatggagaggggtctggctttctcccgagtgggctgagaagccccagtgtgaggtcaagagggtggtgatggggtcctaagtccacaagagcgatgccatgctggggagatcgtgggccagggcccagctggcagctgagtgaggggctcctgtgggcacctggccatgctgcagcagaggtgggagggggccgggttgaggacacagtctgagggcagaggtgtcaatatttgctgatggatctgggtgggggtggccgaggtgggggcggtggaggtaggagcaagaaggacaaggagcagtgagtccaggatggcgtcagcttttagcctgaacctagtgcgggcgatggattccacccggcaggcctcaagggccataccgcagaagtgaggatgctcagtgagggggcctaggccggtgatgaagagctcgctgctgacctgaggggaactagggagaagctgcagctggacagccagggccggctccagggtggggctgggagtctccgcaaagctccctgcaggagtgacaggccctcaacagcctccctgacagcagacggccagggcactgggcatttactggtgggaatcccctgccattgggaccttgctaccctcccctactcctagcccgtgtaatgaagcccttccttccccaatcagtccttggtggccctgctgggtggtgaattctccatccacctgtgccctgcctcacagagttccacaaggtctgccaagcatcacacaggtcgaaggtgggcctttggtgtggccttggacccccaccacctcctctcctggcaggactttactttcccgcctgccctggggagagggctgcaggacatgcttcagccactgaactgtgagctgaggggtctgtgtcacttcaagggggaagctgtgcggtcccctatggacacccacctccttcattcattccacaaacatttattgggcacctaccctggctaggtgctatgctagcacagttatggtccccatcgtcaaaaaacatgctttctagttagagagggatacagacggagataaagtccaagaatacagaaatatgctacagtacaagcatcaggggcatggctgggagagtcagaagcccacacttccgtctcagctccacttctggctgggcgacccagggtgagtgaacttagcctttctgtgtgtctgtataatggggatgacagcagttcacacaatggttactgtgaagaatccatgagttcgtactcataacgtaccatgcctcaggcctcagaaaccatttcaggcttcacagctggaaggagaggcctgggctagaagaactcacccggggtgatgccacagaaagctgggacggcatcgacttcagctggaaggggcagaaggacgggcaggaaagcccaccctgacgagatggcattgagcctgggcagagagccaggaagaaggtccctggtggagggaacagccaatgcaaaagccttgacaggtaacaaaatgggggcacagaagggtcaaaaaactggctccaggttgcccagcaagatgatgggtaccaggacttataatccacgcttctgccccagaagtccctaaaaattccctctaccctccggatgcccttcctgctgctgaaaatccactccgtccaactctgcagtcaccccattcccacagtccctttgtgtatacccgttactctttctttagctcttcttgattccaccctgtaaggacccagcattaacaggtgctgcctgcaacattctcatcatctatacctgacccacctctgtacccccggccctgctgccccctaaaatgccccagcaggcagtgtagtcggagcctcctggctccatccctgctgtgtgctcccaggtctggccttagctgcctcctctaaagctggctgagccagcttttcctcacatcagatgacgattcagattcaagtgtgacaggtaagcacagactgcaccagtcacttcctgcacacgcatctctcatcgtctttcagcggcaagctgagctgctggtgggaagagtgagctgtgtgaggctctgaggaagagctgctgcaaggctgtggattgcacgtggggaacacctacctgctggagcaaagcactgagtgcttaccctggtattttcccagcaggggtgtgcaggatccaggaaagggttctctctctctcttttaagacccaggtctcactatgttgtctagactggcctcaaactcctagtttcaagtgatcctcccgcctcagcctcccaagcagctgggaccacaggcatgtgccattgtgcttggctccagtcctttttaactgttcaggatgcctaagagatgtggaagtggatggatgcccaagcacctagcttcagcccccaggtttcccagcctaccctccagctcaggccctaagacctagtgggcagattctactctctgctccaggccagtcagagccctgcatcctgcttgcccaagtggttcagggagaggcacaagagccagaaggagccgatgaggggaggagaatctctcttcctcctactggggttgccttgaggtcagactacaggcctggggttctctgatggccctcctgccctgggtcagggaggatctggcaaggggcagggccaaccctaagccagatggagccaagaaatacccgggacttttcaggtccgtgaaccagtaaagcctctttgcttaacccagtttgatagagttcctgtcacatgcaacagagaaggccatgattaacgcagagaccaacacagggtttggagtgcccgaggatctccgtggtcagaggtctgagccctggtaactgttaactgcttgtgggggtgaggatagactcaccaacttcagcattcggagagtccctgcacacctgaaaatgcccttccaatgcagcaacctagggtcctgcagagaggtgccacttccagcctttcccacactgccagggccagcaagctcgccacctccggaggctgcctgctccaccagctctgacttttacacgcactttctggtagcgtgaacccaagtggcttccctggtattgatcccagagagaaggcaggagaatcaccctctgaagtgtggcaagcaccccctgcagggcttcccttggcactgtcttcttctccaagactcagcaccagccacctcagacccaggccagggctcgggatcctgggctgcgggtagcatcaagggccacaggccacagtggcctgtgtctaggggagaggggtcccaacctccaaagacccagctcaaagtgctcctaagagagcccatcctttccatcatcagcaccacaggctacgggagcagcactgcacatcctctgggcccagcacttctggtgtgtggccttgagcttgggcctgggctctcagcctcgctgcctgcacctacgcttcccaggatggctgtggcgaatcagtgagacaataggcggaaggtgttcggcatggggcctggcgcttggtccaggctctgcacaggccggctctgctcactgctatttttatcaatgacagcagacacgttaaacacaaggagcacagagctggagcatgcagatcaggggtactctctgagccctgttcccacaggtggaggggaatggccccctgggggcgctggaagggtgaaacagccacgctccctgcaggatcccagtgacagcatcccctgcctcccttctgcagtagctccagcaggtggatgggacccgaggctgctgggccccaggggctgggcgccgagtgtaggggaggccaggtccacagaagggggctgcctccaggtacagggccctgtgctggaagggcctcagaggcccctgtggaaagctcttagccaagtagtccaaccacactgtcacaccaggtggccacccaagccctgcgtacatgtttctcagagacaagcttctcactcctttttgagggtgcccgtgtcatcatgaagcagctctggggccaaggatgctcttgcagaggtgggagaggtctggtgtggctcacctgtgacatggtcacctgggctcattccagggaggaatgtgacagacagaaagtggacatagccaggcatgtacccctgacggtgtgtaccaggtacaggagcaggagacgctggggtggggttccaatgcggaggtgacagactcagtgaggtccctgctgggcacctgccccagctccatgtgctgcagggctgcatggcgtcccacagatggtgtggctctgcctcctggactcagtttacagatctgtcacccagtgaggaggtagggagcccagggatacctgtggtagcagttcctacatcatggattttaagaggatgtgttcaggagccaagtggccagggtgtgacgtccctagtcgtctaccaactatgtgagactcagctcacccactgcacagggtaacgtgcgttagcgcgtgacaggccctgggaaccatgcctggcgcaccgtcagcacatggaaggattagctattctcgttatttctgactgcttggcccatcacaatgcctgtttgggtcttcctaaagcccagccctggaagctcccttcccttggcactctggacacagaagcccttgctgaccacaacagctgccatccactgcacaaacatgttccgggtgcaggcagtgaggctcagagagttcagggagttgccccaggtcccacagctgataggtggcagatccaggactgaaaccctcctgcctctggctcctgcacccctgccctcccgcagcaccgccagccagatcagctgtgtggctgtcagctgggccagctgggagtaagcggcagatgcccagaggaacatctggaggcctggtagacctcggcagcccccgggatgccctccccaccaacctacaccactttctcaggcttcgtttctgttcttcctccccgcttgctgctggctctcccactttggtacatgattcccttaaagggggcgtccccccagacagaggcctgtgccaggaacgctcactgcttcgttgctaggaaggggtgggaactgagagctgtgctggaggccgggcaaaggccgggacataccaccccgcagggagagaagtggaggtggtacacaggcgcagggccaaagaaagggaagggaaagggcagttcctccttcaactaaaaacgtgcctagctaagacccagcaattccacttccagccatatgatctagaggcctgccaggtgtgtgtgtaaggatcacaaccactgtcacactagtgctagttatgaaaagctagaagcaactggccaaataacctatagccacggcggggactaccactcagcagcacacaggagcaagacagcctgtgtgtagagcccagcgataccctcataagacaatgtcacagtcccgcgccctgagtgatgtcagcaaggatccaacagtagcagctaatacatagtaaggccctatcctgtgccacgtcctgctttcagcacttcacacagaccaacgctttaccctcaccgccctgggaggagggtgcccctggcatcagccatttcacagatgcggccactgtgggacggggggttatgctgcccaaggacatagagatacgatggggcacagccaggatttaaagccaggcaagcaagccccaagctgtgttcttaaccatggctgtctagagttcctagaagtgcacacaaatgcacaggaaaaaaatctggaaggagagactgcaacatgctgagtccaagaggatgttatcctgagctgcaaggcatgcattttctgtgaagaatgtattcacgtgctacacagataattaaaagttaactgaataagaaagaatctacacagaccaaagctggctggttgagggaggtggtttttcctggtttcctgtctccccactgctggcctccacctgtccactctgcagggacccctggttatcccagcctcccctctagggcacatgggcctgggtcgagagatgatcctggagctcggctgtgcccaggagcagtggggacagacttcagggaccgtgtcaggtgggccagcaggatgcaaccctcccctgtccagcgcattgctccggccgtggcctgtgcagcagtgagagcagccgtactctgcagcaagccacaggcagatcacaggctcaggagagagcatcctggtagatgtgagatgtccaagactctttgttcttagctgagcaaaccagtaagccattgccccttactggccccaagtgaatgcaccattccccagaggctcttcctgagacaggcctctctgacatcccaagatagtgcttccatgtgtcccaggaatggctcaaaagcaccatctcccccagtctagaagaagagagaacagggggcagacggagcagggagccagctcaggcactggctttgaggtggccaggtcccactgcgccattcatcaccctagtttgacctcctgggaaaactgtcgtctgcccctggctccccggatgtgtgtcaggaaccaccagcccaggggagttggtgccaggccagcatctgatgaggccaaatcccagtagcccagggagtggaaataacgagaaatctcaggttggacaggagcctgcacgttccccaggccaagtgctcagccctcctccccttcctcttgctatttttggctgtgctaagaatagtctgctttaaatacccatcgctccttggatctgctctcaggatggtcaacggcacctttccaggacccccttggggagcagctactccatgaacccaactcatgcatctccccaagacccccagacacagccctgggtctggcctgcatctgtctgagttccttccatccaggacacggttctgggtctggccagcaactgcccctgagcactcctacccccagacatggcctcaggtctggcctgcatcccccacaagacacagccctgggtctcgcctgtctgcccctgccccccactgacacaaccggtcatacccctgctcaaaggcctttgtgtcccacatcacccctaggcctgacatccaaagttgcgcagggcatggcccaacataccccacttgctatggcggacttgggggggatgggacggaagggcccgggactcaagttgcttcggcacagaaagctcccattctgcccctgctcagcctgtgtgtgttgccatccccaccagcagtcccaggaggggctaggcctcagcgcacaggctggcaccgtcctagccaccgaccttgtgtggcagcttcctatgctcataggccacggtggacctcaagctccgtgcttggaaggatgcagccacgcccacccgccaaggcccagcaagccacagctgcccaccctgaggggtcacccatggtactcacttgttgaagaggttcaggccgatgcggtagtgcctcttgcggatgacatcgttgctaaaggcaggcgagtcccagctgttgcgggcctccttgtggtaggtctgcttgctgagcgtctgctcccgcaggctgtcacgggacgatgactcggagctgcagttgatggtatcgttggagttggacgtgctgttgatgctgtcattgtcaccgtctgagtagtccgactcagacttgctctgccggttggctgagccattgatggccaagtggctgtccaggggcctggggggccggggccgcaactcaggctcctcccgggggaggctcttgggggcgccgctgtggggaccatgcttgggactgccctgctgcccgccaaggctgcgctcgtaagcactctgcctcttgagtgacccccgctccgagcggtcactaaggtccacagagctgtcgctgggtggctcgatggtgagcagcggcagatgctccacccgcagccgctgctcctgccgctccagcgacggcgtgctccggcagctcgtgtccgtgtcagccttgtcctctttgtgggccagggcccagtagtctggggctgcgcccccagcccgtagccgcaggtccgactcggtgctggacggccggtcccctgcctgcgagaggggcagagggggcgacagctcctcctcatcgatgtacagggtgacatcactgtacgaggccgtcatctcgtccagtttgcggtggtccatgccgtgcagggctgtctggggttcggtgtcccgggcccgcgccgcatccagggccggtgcctcctcagtgtgcaggctgcggcagttgagggcatcgtcgatggactcggccagtgatttcacttgcctagagaaggcgtcctccagctcggtgatggcgtccgcaaagtcactggagggggccggagacttgagggtggtgggctcgctgaggtcaccacactcaggggacaccagggctcccagctgggagccgtcgttagtcactgagacctgcttcccctcgaagtaggagctgtgcactttctcaggcccctcaaaggagaactgcatcctcatgttggacagcacaatccggcgtgacatgcggttctctgacatggagctgcgcaagcgctcgaagttcttgttcatctggtactggcgaaacgccgtctggatggtgcgggccgcatggcgggttaccaggcgccccccatactttcgttctagcatctccacctgcgggtgggagaggagaatgagaacagcactgcatgtaggcacagtgcgacatttaccaaactccttcccacttcctagccacgtggctgtgcgacctgggaaggtcccaaagttggtcaaagcaactgctgagggatgctggtgggcttatgcaaaatatgagtcccaaggtcaaactggacagagaagcaccaagttaaaatgagtgcaaccatgtttttcctctctcagacctcttttttttttttttgagacagaatctcgctctgtcacctaggctggagtgcaatggcacaatctcggttcactgcaacctccgcctcctgggttcagacgatcctcctgcctcaacctcccgagtagctgggattacagacacccaccaccacgcccagctaatttttgtatttttagtagagatggggtttcaccatgttggccaggctggtcttgaactcctgacctcaggtgatccacccgcctcgccctcccaaagtgctgggattacaggcgtgagccaccatgcagggcctcagaaactttaaaaggcagtgagatacactatgttgagtgtccccagtgtcttgggtcacagaagcccctggccctggtgcatcttgaggtatgccatctaacgaaacccatttggagaccctggaagaagtatgcacagttcaagagataggctaaagatcccagcaaggcccacaggcttctggactcatttcctttccacagcatcaaccaggcagctcttgtggccagatgggtcactgagcttcagggagacctgtggggtttgctgcactgagaagcaggctttgaggccaggtgcctgagttctaatccaggctatgccccttggtagctgggtgacccagagtaagcactgagcccatgcagttcctcggtttcctcatctattaaatggggtagtgctgggacctgcctcctatgactgtggtgagcctgggagacagaggccaagggctggcacatgccaagcacgggggcagctgggctggaaagaccctcagctgcattctgggaagggatttacagttcgtaaagcccccaagctcccttgctctacagatgggcaaattgtggcccagagaagagactcaacacatactcaagaggccttcaggctctggagctggctttccctcatgagcaccgccattcctagatggctcgtctggcctacacagctcgttcctgtgaggggtgagctacatgcagggagagggcggggtgaaccctgggtgcttcagcgggacacacagacctcccgaattcctgaggcacccgtgaccaaggacggtcctgagggccactccctgcaccttgctcctgagtggacaatgaacacactcctgcggccaagataaggaattggcttctccgccaagccaggcctcttggggtgctggggtggcgtgggcatgtgatgtggggctaggagccaggcaaagcgttgcacctgcctgtatggtcccagatgccactacatgctgggcatcacatcacacctggaggtggaatgggaggcatggaggtccttgccctcgaggagcgaggggtctgtcaaggagagcaggcagctgcaggcgcagaactgaaataatgccaaacagacgtccagcaaatcgaaggctgtggcctgcaccagggagactggctcagggccacgcagggccttgcatgcccatgcgtgctgcctggctctgggtggtcccagcaggctgggtggaggagaagagctgggggggcttgaggggagcagatcaaaatgacttttccaatcccaggccacagtctgttttctctctcgccctgttactgaacgccatccaagaaatgacctcacttccacaactgtaagcagaaagtttctattttttgggttgtgagtggagcttagaaagcccctggggcccataagaggcccaaggctgggatctaggaagcctttcttccctcactgtactttgtgggcggcacaagtacgaggacctccagctcaggcctagagctccccgcagggccttctcacctgctggctccggacctcgcagaccacgcagccaccctgttttcctgagacctcctgcccaaacctgtgtgtgttgggggcgaagggacttcaggaaggcagcaatgggctctgcatttgttcaccagagcccctggcagttcctcccccagggggacacacatggacctggggctactcttcctcgtccccaaacttaccgtgggtcattcttctttctgggatggaactattgccaggcccggtcgaaaagtttcccgggacccagtggatgagattctactaacatgtgctcatctactatgtgtgctggggacccccataccctcatgccacctcacagcagcttctgctctcccgaggggtttcactaccccacttctcagcaaggacaagacactcagcggagggaagacgctcagcggagggaagccgctgccccagggcacatggttcctggatagaggagtcgaccccgtggccagggctcccccatccggccctcacttgtcccttcaagggaaacttctgagcagtacagaagaggaacccggaagaatgcccttcagcaaagcagaactgtcacttcttgatgacacagggacagtacctgaaacccactcaagtttcctgcttcagggacagaaagccactggagggcacagtgggtcaggggccagaagagcacaggagactagcccttgggctcctttcactaaaatggactctgtgttatccagacttaaaactcctcgtggaatcgggcaccctactttttcatctggtgattcccatgcaatctgtcccattcccacttttgctgagctttccaggaagctcagtggaccatcaaatgctcagtggcccttgatgtcgcctcctccctcttacctctttggaacctcttccaggccttcctttccatttcacacactcggcagcctttacatcagctgttgcctcttcctgggacagccagctctaatgcctccttagagaggtcttcccaaccagccttacccaatgctattgcctcccgtagctgccctatttctttccccaatgtttagaatccctagagtttgcattactttctggaagtcaactgcctctgcattgctaacttgctcctgtccagctcctgtgccacagtggagctcaagagcaggggcctcgccttggtcatgggcacccaacacagtgtctggtgcatagtgggcgttcagataatatgcatggaatgaaaatgaatagctgcagtcctattaggcccacagtaagcatataattctcttcaaaggcctctattaagtcccaacctttctcctttctgtttaaatggctctgttgcagacatctcttactataaaccgtggtccactttggatctgggcatcacggataaaggaacagaggttgctctgccctgtgtcggtccggcctaagttgcaaggcagcaccgacagccaggtgaggaaggggctgatgggggcttccctgtcaagagagtggacgacccccaaccccaggcagtatctgcaccactcccttaggaagttggggcacaccaggcccagaactctactccttaaaggacaaaaaggggagcaacttgaatctatactcccagcaaacacaaacaaacaaaaacaacccaaaaattgtttttaaagaaaaaggataaccaggaagatctgggagcaagcagagggcgggcggggccacaggatgggtgtgggtgggagtgaaggccaggggcttctgcagcatggagtctgggaagacgggaaagggccctggggccagcaggggcagaggcagctgcctgggcatctggaggagctgtctagagctcagtgcccaggagctggggagagtctgacagccctccccagcctgcccctgcaagcttgcagaactgctgcctgggagcccgggttctcttgaagcctcaaactgctaagcggcttgtccatgcactggcccactcaccccctcactcatccatctgtgcagtcactcagatcctcattcaaacacctactgtgcacctgcacttggagggacttggaagcgagagctcttggcctccccagggaccgctcagggcctcgctctttcctctgcaccccaggattctcctctcctggctcaaccctgagaggctacctcttgtcctccctcaagcccagccctaggcacactgtgggtctgggccacctctaagggccaaggcccctgggggaggggtgcagtcttcaatgaggggatttcccacaggagcagggaggtgtgagccaggaggaatagagcaagcagcctcccctggctggctgccgatggggttctttccagagcttgtgatatttatgctgtcaatggacctccctccctcagccctctcctgggtctttagaacctcagtggccggccacgtacccagtgtgtcccgatgacactgggcctcatgctcagacacctatcatggccccccagatctgggccatgcgggtcatggaacccgggccatggcaaaggcctcatgtgaagacaactctctagaagtccccagaaggaacgccagacaacccaggtccttcatacacgccagccagagccagctggggcaagaggctcctgagagcagctacaggtggagctggaactggggcagagccctcagccttagcccacatgcaccccaactcaagtctatgggagagatctgccaccatgcctggtgggggcacacatggtgggcagagctgccctgcgcttgcatgtgtggcctgaggggctgtgctctcctacctgcttgtcctgcaggtccgaggagagctcatagctctcggagagtgagcgtgagcgcttgatggcctcctcctcagcctgcttgcgcaggatggaggtcgagtgctgcagcttgggcctccgcgtgcgctgctgttgccccggcggccccgagtacagcccataggctcccactgacgtgtgctcgtagtgatccgggctcaggctggaaccgggcaccaaggggccctgggggtaggctgaggggctgtccagggatgtgccagtctcactgctgggggcctcgccctcgacgctgcagaggagagagaggtgagaagcttctggtaagcgggaaatctgaacacgacaccgggccgtggggcgtgaccccaccatgctcctggaggagcccccatgcccgttcttctcacaccccatggctgagtccacatgtgcagctggcaggaccctgcaaaacccctccactcagcaccccacccactcgggttcagtttctctgtgaagtgcaccatcctctgacatcccatataccttcctcattgattttgctcactgtccatcatccacatgcaaatgccagctccctgaggacagcagttttggccactgggtcgctgatcacccccagagcccagagcagtgcctggcacacagcaggtgctcagcaattactgactcagcgaattctgtcgccttttctcctaccacctgcattaaatacaccactgattttaaacttaaaaaaaaggccgggcgcggtggctcacacctgtaatcccagcactttgggaggccgaggagggcggatcacgaggtcaggaaattgagaccatcctggctaacacggcgaaaccctgtctctactaaaaaatacaaaaaattagccgggcgtggtggtggtcgcctgtagtcccagctactcaggaggctgaggcaggagaatagcatgaacccgggaagcagagcttgcagtgagccaagattgcgccactgcactccagcctgggctacagagcaagactccgtctctaaaaaaaaaaagaaaagccccaataattaacaaaagcgattctgtactgtatgcctacatggggccagcccttgtgctggtgtttgctgtgaatgaactgtaccctccacatttgtgtgttgaagccctggcccccacctcagcacgggactgtgttttggaaacagggtctttgtggacactggggtgtcctgatccagcctgactggtgtctttgtaggcagagatgaggccacggacgcgcacagagggagcagcatgcgaggacccgaggaggagaagaccacctgcaggccaaggagaggggccatgggggaacccaccctgcctacgccctgatccccgacttccagcctccagaattgtgtgacaataaatgtctgttgtcgaaggcccctgtgtgtggtgtgtgtcacggcgaatttggaaactcatacattgctgtatatacattttctctaaatcttaaaagcagtctacaaagaggaatcatcgactcccctttttcaggtgaggagactgaggcctacagggggtgccaggatgacccaggtaggaagtaggtgagtcagagttcaagcccaagtggtgggaccctgagacccagtggtcccctccgcctcaccacctcctgtccctgcaatgtgcacacatttctctgacatctccaagcaccatgggggagcagtgcccctggtggggccatgcggggcgggctgacgagctcatcccgactcggaactcgcaagccttttcactgtgtgcagacgctggtttccgctgcaggtggcttctcagtgtaggacgagcagggaagggagcgagttatgtcacagtttccaacacaacatccagtcaccctgccaggtgccctgtccctgtcagatcactcaaccctgggctagaaggaccctgaaagaccctctgctcccacgggccggggtggaggtcccactagatgggcacagcagagagatgggcacacagaccccactcagctgcggtgccccctcctggtgcctccttcagacctccttcagacccagggcagtgggtccagccctgttctgctctgcttctgtctctgctgctcctcacgaggcctgcaggaccccagtgcccagtgcagaatgtgacgtctccggctcccgtgaagcctggagtgggggccccagcaggcggcctggagcagagggcacaaccagtggcccaggtggtagggagtgacggccctttgctgccaattctgccctgagccagggctgggctgcagatcttggcacctgctttccagcctgcagattaggacatgacttctggctctggcctccggggtcaggcaggggatgcccaccccactccccaggagctgggccatgacagaggcgtcttcctgaggaagagcctgaatgaagagggggtcccagggccctctgtggctctgccctcatcagattgagaatcagggcaggctgcccctcccttcaaggtcccagtttccctatcagtaacacggtgggctggactcaatgcctgcaagccctctgaggaacaccacccttcgagattctccacatcatgagagtctcccaagcccctcccctacagcccccacccacagcagcctcctttggacctggtgtgtgtgccttggtagggggcgagggggagaacaggcagatctgaaaatcctcccattctattgctaaagctttgagcagggactcgcaataaacactcaccaacctaatcaactgtacaaaggagcaaatgagtccccatctcagacttcaggccccagagcctcaggttgcaggggagcgttggcctcgccgggaagcccatcccacactgtctgaccccagagctcacgcctctgctccaggcctgtgcacctccctcctgtctgaccccagagcccacgcctctgctccaggcctgtgcacctccctccggctcgcctcgtctttgcagcccgagggcacatcacacacgcccgggactggaagcacttcagtcaggcgccaaatctgtgcttccaggcacagatcacagggaacaacggctggtccttaaagagatgcagccgggcctccgctcctaagaggaggattcaaaacaatctcatcaccctaagttcacagaagcacagagacagacaagcagtttccctgcaggtccctggagctgaagcaggaagccccttggtggcccacaggctgctgctgagctgctgggaggcaccgtcagggaggggagtgtgggaccctcactgtgctgcccccgacccaggatggaggagcaatgttcacctcaagtctgaaggaattccacccttcaccaagccctttctaacctggcctgaaaccactgtgagcaggcagagcagggcatccttccctgatggttgggggtgagtgagggcccaggcctgcctgagaacttgagaggggcctttgttcccagttggccgcggtgtggggcagagggggttggggaaagagatcaggcggcagccactgaactcagaatgggcaggagatgggagtgcctggcgctggtagttcagggtggctttgggccccggggcagggtatctttggggataggattgcaatggtggtggcctggggcagactttctgggcctgtggcagcccaggattccgctctgggcactcctgggttcctggctgccctgggtcagcaggtccagaacatgcttgggagtggccgggcctccctctccaggaagggaaggcctgacagtcacccacagtcttcccttccatcctggagccagggtcctgggggtcatcagtttaatccctcccccgactcaaacgcccccattcaatctgtcaccgggtcctgtccagtctattgaatagcatcagcttgtgcaatgtggcagcccttccacactccaaaaaaaaaaaaaaaaatcaaacccaacttcaaaccaccccaaaaaaaagaaatggctgggccatcctactgcaaccagtgtggcaccacaggattcttcagcaaacgtggacaaaagtgagcacagtgtggaattttccacatagctatgaacccatttgagccagaggacatcacctcttgatggccccaatcagcaactacgcagtgcagtattagaccctaaaaaagtggcttttctgagtttatctgaactgataaataaaaatacaatttaagtgaaaatacccagtattgacaagtacatgcagccatgggcactctaggactctgctgctaggagtataaatcaggacaggaagttatcgaacttaaatgatgtggacgcttgactattttctggctgaactcgtaaagatgttttgctctacagcaacactctgggctctcagccccaccttcctgattaggactcagctctacccagtttcttcctggggcaggaagaactatcctatgtcaacctttccctttctagggcagaaacacagataccttagtgacagagcttggctataaagtgatggtcacattttaccagcatacatgagtctctaggtgggacttttgggttagagaacagccagactggctcctatatccctgccccgacctcttgagctcagctgctggacatctcaccacccactgtagctgccttggggatgcttctcccaaaaacccagcccattgaacaggactggtgaacacaccagtgtgagtccttaactgcgcctctgaatttattatctctctcagacacctgggctacatgcagaccaaggaatgggccgaggcacctcttccaagtccctgaatattcctggcagttcagagtctctggaacatcctatgagcgttaggtggctgccgcccagcccctttccatagatttgtgcaaaggaaataagaccaatgtgtgcagcagtacatacgaggatgtccacagcagtgttgtttctgattataaacatctggaaataacctaaatgagcatcgacaaggggatgactgaaattaattctgtatccacacactggaaataacatcaaaatggggtaaagatctagtttgatggctgttcttatgaaaaagccttggggattttttgtggactataagatgaatgtgagctgatgtcatgatgtggccgagaagccagtcaccaacatgaataaaaagccaggagcaaaaatagccctgctgcccgccacagttctcagacacagcagaagacagtgtctgggggctgcacagacagtccagagcctgagggcagggacagcagacctgggacacctgcatgccctacccactcctccctggcagacattgctaattgatcacagactccctcctaaagagcttggatgaagcctcagcctccttccaacacagcactccatacaactgatcccagctagcatgtgagatggactctatttgccaaggccaaataacagtatgccaggaagcagtataacagtatgctcctatcaagagctggggctgtgcagccgggaggaaagcagcctcggggagatgatgtgatccccatcatcaagcctctgacaggctgacaagccgaggctagagatttctcctgcaggcagaactatgactgccaatacccgacgtgatgaagtacactctcatgtggttagggctgcttaggaggtggtgagttctctgtcactggaggtgtgcaagctgcggcaggtcagacacccgtcagagaggtggtacaagggactccaatcctggctggaagcctctatcccagggccatatgacctgtctgagtctgccatctttacaccgaggtctcagcttaaccccacttcctccacaaggccaccctcaccccacacactcttccccaccccggggatcacctgatctcgtgtgcagtccatctgcaccatggaggagtcttgctctgtgagggtgggagacaactgcccaagcatcccccaaagccctggcctccagcaaagatgggaatggccatgagcaggaggcctgctccttcccatgagatgagttctgtatgtcctggatgggcccctggtggtgggacaggccaaggacagggccagagagcacgtaagggcctggagctgcatgtggatgcatccacactctgccccagagcccatcacgtgctaaggcacagtgagccctcctttcccagactggggactccaagctttggtcactgaaaggtcgccaagctcttcccccttctccagttttccaaacatgttttcctgtgatggaagtggtatgtggtgttttatgtggggacatggctgggtgaagcgctagatccctataggacagtgttgcaatggacacctcgcaggaatagagatcacaacttgaagagtttcctcctgctgccccgccccacccaggctttctgccaagcaaggggccaagcaggctcctgggtggaattctagctctactgcttaccagctgtgtgaccacaggaggaattaatgctgtgcctcaggttccttcctctaaaattggggtaattagtgtatctacttcacaggactgtgaagacttagtggagctaattaatacagtgaggtccttaagaaagtgcttggctcttaaaaagcacttttcaatggctgtcttgggttattctctgatctacaagccccagcagctggaggcaggaagggcagacaagcctagtgccccaagccagggtcacctgccctgcaccctgcctgctgttgagaccctctcttcgagacacccacctccaggctggagagcctgaccccagggtggagggagacctggacccagacaccttccactggcctgttccctggactggggagctcatggggatgggtgagaaaggcagacagtccaaccccagcccctcagcccagacctgttggatgccacgtcccgactcgccagggaatgagtcagggctggggggctgtggcctctcagccacggatgtctctaattatggcctatgaagtaatgaatgacttttctcaagaaaaatgttagccaggggaggttctgggcaccagtgagggtacaagatgaaagcagtgacccactgttcacccccaatatcgacaacgacaatggtagtaacagcgaatgtctatatggctagtgatgttctaagctgtatatggaacacattcagtgctctcaataccctgcaggcacggaaaggtggcacccatccccaagggcatatgggcagcttggccaggacgcccgaacacttgcccattgtgttcatgcaacttcttacggagagggcaaacacacatgtatgtacacacatatacatacgcaaacacaagtatacacgggtctgaattatacagcagcaacttctccacaaacctgccaggtacaagatgccgtggtgggtgtgtttaaaatacatgacctgtaactcaaccaccgtcgctgggaggtagctaggactgctcccttctgcagatgacaaactcagggatggaagagttgagtcaccaagtcaaggttgtgagtataagacagagttgtgtgggacctgaccccacaccatgcctctcctgcccagctgctcaggggaaaagcatgctgctggcagcttggacagggctgggtccagagcctaggggtcctggggttgtgcacagttatgagataaatcagagaaataagcctagccacgtgtggccagagggtggccacatcacatggcaaagccaccctcttcagagggggccgggccccatgctagaggaagcaggcaatcttgaaagcctgtctgtggttaaatgtccatgccagcagcctcaggccagactcctggcagtctgcacaggccagagcaaaacagcctcctgaagtacgtatgcccatcacgcctccaggcctcatggcttcccctatactctgctttcagggtttctgatttccagaaagggagcctagactgggcaggcacaattcatttccagccctcacaagctccctcttggggctttctgtggctcttctctgcctaggccacattaaccaaggttagtcacccagaggaaggaaggggatggtcttgttctgcacagggctatcttcacctctatgcccccgtctcggggagggatgggacacagccaggcagggtctggggggcgggtgggggcacatcctctgagcaagagcagggatggcacagctggagagaggtggccgccacccctgccaggtctctgcagggtggtcctggtgcagagagaacaggcaggtttgtgaggccaggggcaggagcttcagacagctagcagttttgaacagttcagcaatttaagaaggggctgctttaagggctagtgcaggtgttcaagcagggtctggaaaaatcagtctttctgggctgatgtggctggggctgggtcacccacacgtatgctcacccactatgccactatgcgacgggggagcccagcacaagctaagtacacagatttcacccctgcaacaagcctgtcaagaaagcactgctcttcccattctccatatgagaaaatggaggctcaagaagggcccactgtgatccttgcccaggactgcagaccacagagcagagccaagattcaaatccatgtcattcttctagtccttcccattctggaatgttctcgggactgcagtccccaagagttagcctggccccaaggagcagaatgcaaggatacaaagaaatggacctcaaaggaaaaccgaatgtgcaaagaagggacataaagttggccagctgtggtggctcacgcctgcaatcctagcactttgggaggccgaggtgggacactgcttgaggccaggagtttgagatcagtttgagaaacgtagcaagaccctgtctccacaaaacattttttaaaaatattagctgggcatgatggcaagtgtctgtagtcccggtgctttcggaggccagggcaggaggatcacttgaggccaggagttgaagaccagcctggataacataatgagactccatctctacaaattttttttttttttgatacggagtctcactctgttgcccaggctggagtgcagtggcgtgatctcggctcaccgcaagcttcacccccggggttcatgccattctcctgcctcagcctcccaagtagctgggactacaggcacccaccaccatgcctggctaattttttttttgtatttttagtagagacggggtttcatagtgttcaccaggatggtctcgatctcctgacctcgtgatccacccgtcttggcctcccaaaatgctgagattacaggtgtgagccactgcgcccggccaaaaaaattttttaaatagctgggagcagtgtctcttgcctgtagtcctggctactcaggaggctgggacaggaggatcccttgaccacaaggagttcaaggctgcagttagctatgatgacatgactgtactccagcctgggccacagaacaagaccctgcctctaaaaaacttttaaaaagttataataaaagggctgggcatggcggctaacgcctgtaatcccagtactttaggaggccaaggaggatggatcacctgagcccaggtgttcgagactggcctggccaacatggttaaactctgtctctactaaaaatacaaaaaatagctgggtgtggtggcgcaagcatgtaatcccagctactcgggaggctaaggcgcgagaactgcttaaacccgggaggcggaggttgcagtgagttgagattgcaccactgggcaacagagtgaaactcggagtgtactccagctgggcaacaaagtgaacctctatctcaaaaaaaaaaaaaattagaataaaagaagagacatagagctggtgtagccagcaagacaggaacagtgagggctttcccaggggaggctgttctagtgccggtcagccatacccacttctctagtcttgagcggaggcagcatccccactgatgcctaaagccttacagcctggcacgcagttctaggagaatgatgcctggctgttgaccaaaaagacttatggactcctgaggtccttcctagggagcagtagggtgaggacctcctagatgaggcccagcaatgctggtcgcctcccctggcaggcagggtttggatgaacatgaccgggtggtgaggaggaggggtgaggtcgcagcacccccagtggaaacctagggagggtggacagaaagggaacgagtgagccctggaggagcacacgtaatgggcacagatgttgagtcccgtgctcagagcctccagacgctgccaaggtctgggacggaggggctggtggagatggagccctcacatggaaagatttagagcgagagtctgcaggaagcactggcacaaagtgacggccacctaaacatcccatgtgacttccgctggctaaccaggagcaccatatctaaaacgggacaatacagaagtcacccctacagggcgtggcgggagaaggtgggggtcaggagggtttctgcgtttacccagttcccaggtttggagaaatgaggatatccaggaattgcagaggaacccaagaaaccggacatcccgctgtccaggcactgcccctttgaggcctagtagacagcccaacctcaggctccaaactgagcttcctacaccaggccagctccccacagccttcccatctcagcggggtgcagttggggtccttggagctgctcactgagcgtcactcttggcaactctttctcagaccctcctccccatcagtcagcacatcgggctgctccgccttcaacacagagcccgcatctgccagcctgtgtggccctcatcttttccctgtgtgactgccatggcctctccaggctcttctagcctcacatgccaccccaccccgcccctctccacccagcaactgaggtcctgtgaaaacacaaccctgaccacattctcctctcatttggcgggacccaggagactctgcaggacccagccattcctcctgccaccctcctctgaaccccctggccactccagcccagccccctggcctcctggctgttcctctccgctctggcacgctctcaccccaagacctgtgcaggtgctgttcccactgctcagagcggacttcccccaggctgcctggctccctccctcactccatccaggtctctgaagataactggagggatgtggctgagaaggaagaggagaagatggggaggtggcagaagagggatgagggctccaagaaggcatgtggtttgagctggaagagacctgagcatatctgaatggtgacaggcagcgaccctggccggaggaagaggtcgggctcgtgggtgggcacaccaccggaggcagaaatcctcctctggggcctcactgttctctgaggggcaggaagggaggccagtcagctgctgatagggcctgatccttcatcccctcagtaaggtggggctcagccagggacagtttcaggaagctaggtctgaactgagcaagccagggggaaacagagaatgtctcccaccctgtgcctggctgcagggagcacacccacagcgctgtctccatgcctcttggtctccgtgcgccgtagacagacctgtccaatggcccatcagagcctggaactgccggggcagcccgacccgatccgcgagggacactgaggctgattgtccggttgcctccagagaagatgagcctgggcggagaccggcctcactgacatgcccccgccctggcctcaggcctgccctgctgaggcccgataaggcccggcccaggtccgcctcaggctgcagcattatctttaacgactgtcacccagacctccagaagtggcttttatatatatagaaaaatataggactcgaacaatgaacttttcaaagcgggaggctatttttagagctttgctgactgatccaacattgagcatctccctatgtgtcagcagctgctggagagatgggcagacggcacgaggagtcgggcagcagtcagcgtacagggggcttctcaggccacccaaccacatgaaggaagatgcagtttttcgcactgcccctgccctctggtcccgaatgctctgtacagctccgtcaggcatctaccaccctaatgttgtcatgacaggagtgacagtaacattatgggctagagtccaacacttgagttggaaccccaacttctctgagccttggtttcctacctgcacagtgggggcaaggccgccccttcacagcatcacagtggagtcagtgagagtgttccaggaagccccaccaacagctaatgccatgcctaattagagggtaattatttcaggagagacctctggtcctcagacatggctggttctcatcagcgcgtagtcgggtgggggacagaaagaaaggtctccgtgtcctgtgaacccagggccacacagccaaggcagcccttgtcctgtcaaaggcagtctttccggccccagggaggtgatggctccagcctccccagcccaggcctcgctcccaaacataaagagtaccgtcagcctgcaggggccaggccacaccctccacggctgctgtgagaccctctctcactcaaagagcccaggaacctgagtgggttttggagatgagaatgcaggttccaggagacaggctggggatgagagggcagcccctagaacctggaatcagatctccctcccccctcacagcttcaggggctcgcatgggaaagagcccgagggccttggtggctgtggatcaatggcagtgtggagcccagggctgggagaggccctggggcatgtggatggcagcacagggcgtctgatgggggctgcgtggcaaacatgggggagaggggttcccctcagcaggagggaaggaaaagagggatttgcagggaccatctccccagatctccgctgtctatcacaccaagttaggtttcctcacagcatggctccatatctgactccatcttttatcctgcttttttatttctgtctctccccttgaggaggtcagctcgggaagggcagtgtctgtctgttttcctcactgaagtttccacagtgcctaaatagggctgggcacatggcaggcgctcagtctgaatctgctcaatgaatgaatgatgctgctagtgacttggggacctgcacaaccctgggagtagatgccagcactcctaacacaaaggggtcaggacaggatgccccgcagtcaggatggaaagccacagagcggggcagaacgggtcctcagtgccaaggcacagctggctggctgtcttcttctcccgcaactccacaggccaacggcagggctgctgctctctcatttacaggtgggggcaccgaagcctggagagaacaggggctcaacagtcacatagctgatgcgcagcccagcctggcagagccccgtgactctggagctgtgtccacagccctcctctgctctgcagctgggttgtggagacaccaaaccactatggaaactgtgagtttctccaccgtacagacacatgctcactgtgctgaaaacactgtcctgcaggcctcaagtcaccaaggaacttgaactaccaagatcagccccaccccttgagaatgccctgggctcagctctctgtgtgttgcttcagccctgtgcctaccccaccctcccacagtcccaggaggcctgccgggctgggccgggcattggcggagcctcagaaaggaagcagggggcagactggctccgcaggctggcaacctgcactttcacttgggccgagagccagctggcaggggggctgtgaggctctggatagggggccgatgccaacaccctgcaatcaaccccagccagggcctctgcctggtgaggtgtcactacaacaggcatcactatcagtgccacagaggggccccaatctgcccgaggatctcaccccacatgctggggaccagagcaccaaaccagggtaacaggcttaaaacaggaaaagtcaacccctaacgccaatcctgcagccaaccccaggacaggcagcctttaaagagaggggctgggcaaagccctttattctcccgagcgccaccgggccagggccaaggtgaggatgaggcccatccctcagggaccctcggccttgcccctgggagagttggtcaggagacctggcacctgcccagctgctccccataaggagacctcggactgcacggagctctctggaagatagattctgtgtggggggttcacgaggtctccaatagagactggcagcccctggcccaacttggtccacaaaacatgctctctgtggcccaaacagtgtttcaaaaactagaacgaatcactaacatttcagcaacttaagattttatatgaaaatctaagtttcggactcatcttggggacctgaccaccctgggtccatattcccacttgataacagtcagacaaagcgaggtggcagccgcatccatcagacagcacatgttctgtcaccaccaaagtccccaccactgccacagtccccaccactccttatcgcccacccacacctgggccaccccttctcttcctgcctattgacggcatccatgtttgcctatgatgcttacacaggaccaaaattcaaggcccaacgcaaagaacagaactaggatctacagtttgggaccagttgttcccaagaaacctaatttagaacaccaattcccgagaggcagggttcaagaactcccacagctctgcatggctggtgggaacaccaaggccttctgctccactgggtcctgtgagtgtgtggtttttacaaggctctagcaaattaataccgtcgcagtgaccacaatccacaatcccatggtcatcataaccaccaagcctcaattcaccagacgccctcgttcctaagtttcctagggttagaatataattttcaaagccatctgatacctggtgtttattccaaaactggattctaagaggatgttcttgggttcaaattcaagctgttcccaccctcggcagccccctctgtccacctgtgagaatgccaacctgagtttggaggaatgcccaatggctccagaagcgtccctggggagtgtggggggagctctacgtgcaatcgggagaccaggtctctctacagctcccctacttccaggctgagtggccccaggcaagtgccctccactctctgggcttctgtggtctcatcttcacaacgggtgtcactcctgctccgcttgcccaacgggagcgtgggaatcgagggaagacacactttaccaactgtaaatcccacgtggagctgtttctgctctgtgccatcagccagagaggaaaggctcaacgcccttaactcctcaagtcttgtggctgggcttgtccaggtcagaaagagggacatcaggagaagtgttccccagcccagcgccaaattaagccctgagggatcaggaaacgagatacgtccatctctgtgcctgcatagagggctttatgcttccaaaggcctccttccttccactctgccacagcttacctggtctcaagatacaaagtttacaagactgcttcccttgccatgacctcatctgcatggcctcaccttctccccttgttcctttactttcttcattaaccattcctatagcctgccctctgccagacgcttgtccctggctaagaagggtggttcttgttggttctgagtgcacggagatgaccagaagcttccaacccctgggctcactcggaaagatttttcagaatatacacacgcacagagccaaaaatcttcccggctgagccaaattaaatacagaggcctctagttatttccatacgcaccaaatggacttaaataaagcagttctctgtggcaggctccagcagagagagctaggctgggccccagggacaccccaggagagccaggctggaggcacaggctggggaggctggctctggacagggtgtggacagagaggaggagacagatgcccatcgcgcagaaggccttcctcatggcccgccctgccagccagggcctgtggtggggccatcttggcccagacaatcttggtcttttttaggtgcatagcaaaactgaaaggaaagtatggcattcccatgtacccactgccccaacacaggcacagccactatcaacatccacactagagtggcacgtttttacagtccatgaactacggtgacacatcatcatcaccagggtccacagtctacattcggctccacacttggtgttgtaaacagcaaccttttgaagcaggtactatatcatcttcccattttgtggatgaagaaactaaggcacagagagttgatgtaatttacccaaggccgcgtgactcacaaagaaagtgaggaggggtgaggctggctgaggccccgggacacctccctgcctgtcatgttcttacctctgtggggccagcccaccaccctatctaaccatcgagctccccctgcccttgcaggacctggtgcaggtgctgcccagacctgcagcacggcagctgccaggccccacagcaagtcagcaatctgcccacagcacccagcacaggggcacagaaagggtcttggggacaaatgaaggctgggggtaggaaacactatccccctcaacctcccctacctacaacattggcacacagagctcttccccggcaactgtctggtacccagcaggcaggagctgtgtggccctgggcaaatgacttggcctctctgtgtctgtttctcagtcataaaatgggagtattgtccacccagcagggctgctgtgagggccatataataacacacacaaaatcctcagcctggggcctgtcacccaggaaaagcagagagtagctgctgccactgtcacgatttaagactgttatcacgtcgctgcactgcatggtgccatgggtgctagagggaggtgagctggccaaagaggaagaggtctgaaggaacatagaccatctgattccacactagcacccatacctggggagcacgaggggtgcctggctgggatgtggccatgcctagggtgtgactttggcttgttttggcttctaagccaactaagctgggttgggggcactctatgtaccaagcactgtgctaggagctagggtagcaaacacactcatactgaggacagtggctgaaatgtgttagcacttgctacatgccaggctctaagcccagcactgtggggtggcacagcaccgggtgatgatgacaaaggtgagtaaaggtgacgggagctgtctaggatgactttggtattctgagtgaagcccaagaggatcagatgatgtcatggaagagaagccaatttggggagagggagataatatgtgtcctttggaacttacagatttgcaggtgcccatgagacccctagagagggttgctgggtgggtggcaggatgtcagggcctgggcaggagccagatcagaaaccccaggaaggaaaagactgtgtgaagtagagaaggaaagagggctgggcagaggcccagggacccccagtgctgaatggccacccaggggcccagcaagacgaggggctgacaggcctgggagggtggcaggggcgcagcctggctacacgtcctggcaaggggaaagccagggcaacagggagaccctgcggagcttgaagctgagagccacaataccatccaggggacccccaatccgatgagagaggctgacagcccattccacaccccgccctccagaggtcctaggcagatggaagagaagcgagttctcctaccctgacccaggaaggccctgtctgatggaggagtcacgggcctagcctctcccagtcacttccagacacagggcatcccaaatgggtcagacaccacttggtcaccaggctgggaaactggctcaagctcagagttcccgagttgggccaacagagctaagggctgttcaagagacactgtggcctgccccaagcacccgccccagtgacatgacttttccaaggctagaaatgaggccaaccatgagacaggtccttgatataaaatcaacaaaacgtctgggattaaaactaatctcgagcaatgaaataaaactgcacatagggatcattataccattctacttttgtacgttgcacattttacataacaaaaagctaaaaataacgctaagactctgctatcacatcaaggtccattatcttcttgggccattttgccatttttacgaagcacaaacaaaaaatctcaaaccctgctcatttaaatgacggctctgagaacagtcaatggcccagagggaacagagaattcacgttcctgcgaccgcacctccccctcccccagcagcagaggaaagagctgcttccccaaacacttcctctccaccctaccctcaccccatggaaatagcggcactgcaatggtataacgatgacggctggagagaatagcagtgcagtgggtaggggtcatcacagcagctgccatttactgaacacctactaggtgccgggcgctactccagcctctctttcccatcatctcgggtggacagtcgtcctgatcctgtcaggaatctgaggatcgttcttagcccagatgacttcctggggctggcgaacatgtttttgagattgtaggcactgggtagagcttccaaggattctccttccactctgctgatggtagtgcacctctgtagccatccacggtggctgtacagggaacccaatgctgccactggagtgcgcacagctggggcctgcaggttttgtctctccggctcctccttggccccctgctcctccctgcctctgcctcaggctgcattctaacaagctgctccccagcaatgccagggaggggaaagagggtccatgcatttaccagaggaccaggtctatattctgcagagcttgaattcgtcattttcattttctagccattctttcctcatctgtcaaatgagaataatgccagtgatttcacaaggttcttggttccaatcagacaggtatgtgtgaagttcaaaggccatccaaatgccagtatcatcattttcattctgtagcctgttctagccccagtctcaatcttgtgccaacttaagacccaccaaaaacagttgaggctttgcccaaacccagctgactccccttccccttcctgccggcacgcatagtcacctgttttgtgtctacccacactgcctctccctccattgttcccatttgacaggcaaggaggcagcagcttgcagtggggaccaccttgccctggccacacatccaggaaagggcagaaacaggatccaagtttctccagctccagatggcacctctgcccactgcagcaagctgcctcccctcccaggcagacagaccagctgaagaggacagagcagcagaaccagggactgaaggccactgcccctgaggccaggctctgcagctttgggccttattaggctccagaagcagccccaggtaccaccaggaagccagacctgcccaaagcctcagaagctcagcacaggccaccagctgagggctccagacgcaccacagctctgctccatctgacacagggctgggggcctctaccttgatgtcctaacacctcagggtgtctcacacatggtgcaggccatttgcccattcctatctaaagaaatcttcatcccagcccaactgcaagctgccttactttgcaatttccccaatccacaggcaaagcgattttcttaatacccttaaccatccacttctttgtgggctgtttggacagcacgctacaagcacaagctaaagtccatgggcttagtcacttcttactgtgtctgccatctgtcataccaccaacagcctgcagccctttagccctttaacttcttcccctcaccactatctctctgcacccctctcttttaaccctggtcctgtctgtgtgccaaaaagataaacaatccactcccatctaggaacacatctccccaaacaagtaatacggtccagttccacacagtcaaacttctcgggcctaaaacatcagctaaaggatgccatgtttctggtgctgactatgcactgttgaagcactcacatggattcattcatttaatcctcacaacaactccatggcctcctcctgtcatccatcttttaccaatggggaaactgaggcacagaaaggctaaggaaggtgcccaagatcatagggacaatgaggagcagagctggctttagagttggagttagagttacaggtagtctgactacagaatctgcctccctaaccattgggctaaacatcctgcatctgcaaatgactacaaggatcaagaggctcattcttcttctcacagatgtggaaactgaggcccagggagggatgggatgagatgggtgactgacgccagggctctagggaggcagacgaccaacggtcaatcagggccagttctggacaggcctttctgaaaggtttcctctctcaggatgggagacctttgagcttaagggcagccagaataaggacaacaatgatcacaactaacatctaccgggcccttgctatgttactatgagacaccgtttaattgctttacatgtattcatgcatctcatgattataccacctaccctcccagccagaaatagaaaagcaaacaccactggcttctgtaaatggcatcagggagaaagtattcatgttggcagacagactctgatccggtctgggcagcaggggattttgggagaacccttccagtttgtgtgaatgaggaggactcctcccagctggggactcgttccaattcttccagtttattaatgatccctctcccctcccatgggatccagttcagcacccacacacctgtgtgtcctctagtgattcaaaagccctagccttgggtttcctcaccatgcagaagcctgtcatgttcgcatgggtccctcagtgagttaggggacagtcagttttagtcctcaggaccctgctccaagcagagtcttggcctggggctgcgcacagcacacaagcatgctaccctcaagagcctgcaagtgcaaaggacactgtcccagaatcctgccggagagtctggggatgcagctcttgggttctgtggggaaagagacaagatgccaggaaggcccggtgagtggtcatcaaccagcttgtgggctgagacttctgagaacatgttgggaatcctgatacctggggataccagacatctgttgtggcagtatagggaagaagcaaaaggctccattcatggtggtgacatattttgccaaagattatttaatcccagaggaagcagagcctggccatgaagtacacagaccctgaagccaggcaggcggagttcaaacgctaactctagcactctagcaactttagcactaaatggcaactgttgctattactattactactgagctttgaacaaagaggaaaaaacaaatgcagtcacagtgtctcatctttagaaacagggaggggacgcttgctatggttctccatcgggaccttaagttcaaatcaaactgtcaccatgtcaggaaactgcaaaccgaggagataaaacggaaagaatgggcatttcctccaaggagcagcgaagctgcaggtacctatgaacaaggcaaaaaagaaattcaagtcagagcagctgggaccccaagaaggaagatttcacaaaaagccacacaggctctagaaatcagtcttcaacctcacaaacgagcaaaaaagaaaactgtgaggaatcattttaactcagcaacaatttcacaaacgggaaaaggtggtaataatgatgatggtgataacagctaccatttgttggggatctatctgtatgctttggtcaccaggcaaagctgcacatcccccaccccctccccaggggtttcttttggctccatttcatggatgagaaaatcaagactcagagatggaaggcaacatatctgaggccacacagccaggaagaggtggagtcagggttttgtgtgatccccaagtcctgtgctctgtgatgtaccatttcacactactaacctcagtgcttctacatctagcccagggcctggtacaaagttggtgctcagtaaatgtttgttgtgtgcataaaggaacacaggaaagtgaaaagctgcgtgtcccctgggtcatacacatctctccagagaacaacgcactcctccaagcccaagacagcatgtgtgcacttgttaacacctgcatttatggatgctttcattcactgacaactggctatgtccgccatgaggccaggcgctatgctaggcaggcatcggggtactagccacagggccaggacttggagggacacttgcccaattcagggtacagccatggcagccaggatagtggcaggtccaggtggcatcatgccatacttcaaccataaatgccatcaatttcctctctgcagcagctcatgcagtgggagcagccagattctctaaggccatgccaattaattcttcaagagccttaatggcctctaaactcattacaatttgcttttgaggacaaacaataaatcacattcaacagcatttgagcatactccccctacacacacacacacacacacacacacatgcttccatgggagatctctcccaaggcctccggtggtgtttgagcccatctgggctgtgcatcatcttgcccctgtgcttactgggcggatattccacatgtcatcataattcaaaggaaatttacaaaacaggaagcaagaaaatccagcgggtcattggtgcctgggaagagcagagtgctgacctggacaaacatggcatttgactggagtcccgaggatggccagctgtgcagtggccttcagacatccacattctcagagcactccatgaagcagtgttatcattccctttcacagaaggggaaacaggcttggaggggtgtggtaacttgcatacactcacgaaactgagctgggacttgaaacaaaatctgtttgcctccccaggcccttctttccttaagtctcaagctgccctggattccagattatcctggtaaaccaagattccacagtatgcagagtccagacagataaaaccgtatgcacacacagatgcacacacatgcacacacacatatactgagctcctgcagccctgggtaccctgtccaatactgtccagaaacatctatttgcccagttgtcacactgtttgactatgcagctgtcagtcctgtccatgtttttgaactgaagctgtgtaaatattagcgcaaccagttcatagtccgacttccttgagtgaaagcctgaaaatcctagcagggctagccagggcctccagaggcctccatcacaacattggggttctcctgtaggctccccatgtgatattctggcccagtctctgggttctcttagtgtgtgtacccttaaaaaaacgaggataagaagagtcctgtgtttcacaaggctcaaacagcaaagtgccacacacgctcttggaaagaagcctgttatttgtagagtggtgcatggtggcatggctggacttgggagtggttatcttgggcccgttacagactaaggggggtcccctgaggtttctggaccgtgctgcatcccatccgggtttagagagggggagacggccagcttaaagggctctggcccctgggagccagcccaaggagcatctagctctgcctccacaggccaaggactgggttgatttcctctacccctcccccaagcttcccatggaaccacataccaggtgctccagagcaaatgggatccacctgctctgaggctgatgcgtgaactatgggctacacctgagcgaggcttctcaacctccaagacctctgcctcatgttctgagactgggggagcagctgttcatcaccaacccagaccacagaaggatccaagcaggcttccctgaagctggaagattgagatgagatgcccggagggacttctaatgagaagggatgtgggactgagaagtatgcaagagaggtggcctggacatgtcaactggaatggtcctaatggaggggcagaaacccctccccagttactttcagctcagagggaggcgggaggtgcagccaggagagcacgctaatggtttcttgttccccactagactgctggttccatgaggacaaagactccatgttttgttcactgctgtgtctctggtgcctagagcagggactggtacatagcaggcactcaataaaccacagagctttagtactgacaagactgaatgctcagcctcgatttgctctcctgcaatatgaggatgctggtaccacaagggtaagaagcaattgtaataccaggtgggacagctgatggactatgagggccgcgggtgtgtgtgggatatgaataacatgacccccatgtccagactgctgccactgattccagacagatggtcttgcagctgcagcatgcctggcctccaccccagatgcaaggagcaatggggtccttgagaagccccccaaccccacttggaggctcaggctcagcgctccaggcctctggggtgaggaaggggcagagggagacatatgcatgttctcagtgcaactgctggacatgcgctgcacaatttttgaactgaaagatcaaacagctccaggtgggcttcctccagagggggcctgacataagccaagtcagcttgtcaacaaatccccttagccccacccccctgctcctcagaagggcctgcagatagctcagggggcagctgtgctggccatcgcagagaggaaatcaatattcccagcacatacacacacactccctttctccctttctctccataaacacgggcccttggaagctcagacagccgcccacaggcccctaagtagaaaagggttggcccctctgacacaccagactccatccctgaccacaccaggtgcacacgcatcaccacacaaagcccctcacatccacactctgccacaaacagcagccacacaccccagtgcacccccaagtggccctgccaggggcagagtacccgacagaagctgctgacacacctgggacgcctgtttgttcagggtcatccaccctcacacacacttggggtcttgcagacaggacagacacatcaatccagacataggcccaatgtctggaatagacaggcctgcaagaggccttcctggcagctccggccctgcctgcagttggaaacaggcacagacccgctgggcaccctcccaccaactctccgctctccctcctgcccctcacctcacacccacaccgagtcccactgtttccctctcaagcccccaaactcaaactcacccccacaccaacttgcactccaacaggccctcgatcacacacacacactcccatcctgagaccctcccagggcacacacagcgctcctgtcccaagggcgcgtctctctctcccacgcacaaactcgggtcctgtttgctcttctctcacccaaacccacagtctggcggacgcaccccgccccgcaggcagctttctctcgcacgccgggcgcccggtcccgacggtcacccgcactcccgcacaggcatccccacagcctgcgccagcccaccgctcagcacccgggaaggccgctcgccccgcgccgcgccctcacccgctgtcaagctctagctccagaagggactgggtcctctccgagttgcagtgcaggcaccacatggcggccgcagtgggagcgggccgggccgggagccgggacccaggcccagcagaggccgccgactcccgccagcgagccgccggatcccggggccgacacccggccacccggagacccgaccacccgccacgcgatcacgtcggggctcctggtccagcgtccgccggctcccgcggctccggccccaagtccgagccccaggccagccaagcccgcccctccgccgccgcccgcttggcgcagcgcgaggccgggccggaggaatgtggccctgaagtgggcggggcagggcgggggcggggccggagggcgagctgggggcggggccggagggcgagctgggggcggggctgcgcgcgggggcgagactgcacggagcgtgtggggaagagagcacaggaggcgtggccacacggcgccgcggaagaagcacagggggcggggggtcaggggcggggcgtcaggggcggggctacgcgcaggggcggggccgagccgaggcgcggggtgcagagcgcaagggcggagtcccagacactgcatccaggtcccagcgcgcgaagcctctgttctggaaggaggactttgcgcagcccctccaacactggcgcctcccgggagccatgtcttcctctccagcgtgtaaccacaacaaatgcacagcgccaaacccccaaccagagcctactccgctgatgcctactcaacatctgcctatcccgattttgccttcagtttataaaacctggcctttgcctgcctggaccgaaccgtgtggttctggggctctgatgcgccccagagaagggaatgggccctatcctgaggttggtaccacccttttggcggctttttgggggaagatctaatggaaagttgcttctttctccctaagcccacccagccccctaccctttctccacccagagacacccttcaagcacctatgacaagcttaaagtaatactaattagcactttagagttctttagtgatagttggccttcaaggcaacattgtgaagtaggtggagttacccctggcctcattttaccaatgagtaaactgaggctcagcttaactgggccaactaagagacggcttccctcactctttcctcctctcccaggctcttcctactatgagcgctcatggcttgcagtcctccatttgtatgtttacttgtttattatctgtccttgggctccatgaaggcagatacagtgcccagcgcccacacctgtggaatgcctagacgtggttgggagacagcaagcagatatggaacaatcaaaaccccacctgtcctgggccacccacctacaagtccatctcctggagggccaggcagctggcaggcctacgggagtcaggaagctgcaagaagccatcaaggcaggggcattgtcttgtgcccttctgaatctttcatttggagggggacagtgaaggaagggggctgaggtggcccagcttgcagcagaggagggcagcccctaaagccagtttagagcacctgggttcccaggcaagaagctgagcaggagcccagtgccccttatgccagtttagagcacctgggttccgaggcaagaggctgagcaggaacccagtgccccttcactgcccatctccacattcctcttctcagcttcccatgttttctttgctctgttaaaaataaatgaagacacagaatggggggaaatatttgcaaatcatgtatctagtaagggtctagtgtccatagtacataaagaacgctcacaattcaaaaataataaggcaaataacccaatttaaaaacaggcaaggtatctgagtagatttttctccaaagacaatctacaagtggccaataagcccatgaaaagatgctctcaacctcactaatctttagggaactgtaaatcaagaccgcaataccacctcacactcacaaggaaggccataataaaaaagatggacaaaagtacctatacatagagggttctggaaggagaagaacactaggctgcactgctcaaagaccacagccacatctggcatctgtcatggttagggtaggggtaggaagctgggagaggatagggtacacatgacccagttgatggcagaggcagcagaaaactcccacccctgtctgaagtgctctctaaaaatagactgcaataaatggagccaaaataattcccccagcccagctgctggagcactctgggcacggtctttgacagcctcaccatccggattgtccaagaatttcaggcacttctccaggcccagggccctgccgcccagcaggatggtcttggcgacattgtctcggctgggatttagaaggggattgaatttcgctgttagcatttggaataccagatgatggacactctggaaaccaaatgcatcttgattctcttgttttatctttctgcaaagtgtgcctcttgctcctgctccgctaactgccttgcagattaataatttagggaactgtgagcagaagcaagaaaagttccagcctagagaggcagagaaggccaatttttctgcagaaatgaccagactggtcagaatccttgcatgcaccattcaggcaaattgcttagttttctgagtctcagtttctgcaactgtaaagagtggcttagcagccacctctaccccagctaattcaccttgctgtttaatttaatttagcaagcattaattagtacttactctgaggcctcagtggggaaacactgctgtgacaagtattccccagtatggtgtcgtgacagtggaggaaagagcttgtaattctgccccaggagaggctctaatggggggacattttgggttggaccttgagggatgaggagggccccatgtatggggtcacaggatgtaaaaagtcatggagacgtttagttccactgtatcaccccatgttttagtcctgagctgcttgccttggcccatttcacatgctacaacccgactttatctctatcctccccagcttctgatagcctccagtctttccacagcctccctgctttcctccagccagatgtgtggcactctcccaaagcccagcctttgcagcccctctctccaagctgtcaggatcaagcccagcctccctgcacagccagcctcgtggcctggttcatctctccatcccttacctctcctcctgcccactctatgcctgccacacctccagcaacactaagcttctttcagttccccacactccccactgtgcctggctcacagctaggaccttggttttcagcttcctatgtcactgctcccagaaagacacccatgaccagcgcctagtccaagtcagaaactccttttacatggcatcaggttactctgcacctgcttgcttataccagtgagctgtattccaactgccagggctggttctatgtccttccctgcagcagcccctgtgccgacagtggagcctggtgcacagaaggtcttcgacagctgaatacgccaaaggttggtaaactatggcctgagagccaagtccagcctgctgcctgtttttttaaaataaaggtttattggaacagagccacgctcatccacttatgtattgtcaatggcttcttccatgctatgatgatgaagttaaacagttacaacagacacatgacctgcaaaacatacaatattaatgcgcacatgcagcccttctctgaaataaatgaagctctcctgaggcagtcttacattggctccaactaccctggcaaaccccctgcgtgttcagccagacaccccatgcaagagcagaatccaaacatgggggaagacagtgactgaaatgatagggctgggccagatgatcctcagatgagatggccacaagatgggatgcactgttgggaacgaatcctacagcgccgcctgcccatgtgcacatagaggcatgcccaaggatattaattatttgaaaaagcagaactcgggaggaaacgtgcaatgcctctcaatgcagactggttaagtaaattgtattacacccatcaatggagtcccatgttaaaaagatggcagcagcatcttgcatacttataggaaaagatctgagacacaacattgtgatagaaagtccagaaaaatgtgaagtgtatttataaaagaatctacagaacactagtatgcttatataagattgtataatcatagattacttcttaaaagagacccaagagtgccattgcactccagcctgggagacagagcgagactctgtaccctcctccaacaccaaaaaaaattttttaaacaagtgtttgttactttttaaaaacccagttatgggccaggtgtggtggctcacccaaagtcaggagttcgagaccagcctggccaacatggcgaaaccccatctctactaaaaatacaaaaattagctgggcgtggtggtgggtgcctgtaatcccagctactcaggaggctgaggcaggagaatcacttgaacgcaggaggcagaggagccgagatcgtgccactgcactccagccctggcaacagggtgagactccatctcaaaacaaacaaacaaacaaacaaacaaacaaaaacaaaaggccagttatggattggactggaaccaatgcaatttttttttttttttaatgtgccagtgaagcctgggcaacatgtcaaaatcccatctctacaaaaaaacagaaaaagtagctaggcatgatggcatgtgcctgtagtcgcagctactcaggaggctgaggtgggaggatcacccgagtgtaggaaggtcaaggctgtggtgagctgttattgtgccactgcactcctgcctggatgacagactgagatcctgtcacaaaaaaaaaagccagtgaaatgaagaaatcaagggactgaaggtcttctgacatcttctaggaggctctgaagcccaccagaactagtccacaaagaccccaaacgcttgatggtacttaagccacctcttgggccactccaggttcctcgtctttcaagcaggttgtgtcttactgacaaccacaaaaatcgataagactggtggtgtagcacattttgagcttctgctcagtgtctgttaaccaccactatgttaccattcatcttacgaaatgagcattcccccatcacagccagaatgctgggtctgcgagggagctctgcggctgccacttagccccaaatcctcattttacagacagggaaactgaggtccagagaggtggagggatgtgccccagaactataaacactgacactgacccgaggcttcatgccacactggccaccacaatacagcacccagcctggacaatacagcatccagcctgggcgggtgtgttttaagaccatcattctcatccaaatatggaatagaacctattcctaagactgttagatgcagtaaaaagccagagacagctgcatggaacacagcactctatagagtggcacctcagggaagccagcccatcccccagaacagaaatgtttccagataaataaagctgttcttaccaagtgccaaattatctttaaaattccaaccattttccacagaaaccacttgtgaatttgggacgtgccatatcttactaaacaaagtaaacggaatgaactagggattgctggaggtggtatagggttgtccaccctgacctaggcttctggcccgggtttcctacgtgacactgaactgctcaggcaccacacctgcattgtaatccagctcctgcctgtcttttcagcctcattcccagctatgatccctgcaacgcagccactcccagaatgcaccctgcacttcccagccccagtgcctttgcttatcctgtttccacgtcctgggttgttgcttcatttgattggcaatctcttattcaaccttcaaagcccagctcaaatgtccccttctctttgaggcctcccctaatccctctacccccaggcagagcaagaaccccttacttaagactgtgggcacctcgacggtagggaacattgcgctccatgcaccttcctggtggtggggcccagacactgccattgtcctgtgtaactggcctggttccagacagctaccacagccctagggaaattcatcccaactacaatggtacttgggttggccaagacccaaccatgacagtaagattaaagcagccttaccccatttaccctgatgtgattattaggcattgcatgcctatatcaaaatatctcatgtgacccacaaatatatacacctactgtgtacccacaaaaattaaaaattaaataaacaaagtggctttaatgttaaagtctgatggagccaccaagacccagtgctgcccacccattgttcagatgaggcagctgaggctcacagaagcagggagcacttccccagatcatgtggggacacatccaagaactggttatctggcttcctttccccagctccttctgcactgctaaaacctaagacccgtcgtggtttgaggtgtcaggaggctctgttttcttgtggtctttagatgaataaaaattagacgcagctgttatggtgccattagttgacaaacggactcacctgctgaggatgcatgggaaagaccctgagggaagggctgcaataaagaaccactgcagctaggccacagtgtcccccgcaaggagaaatgaaacccagcacgggtacaggtggctctgccagggctctgaggagcctggcacatgatgggtgctcagtggttggtgagggttttctttagcacacaaaacagccaggaatggtcacctcctccaagaagccctccaagcccggatccccagagcactccatgattctaggtcctcggtgaccaatgtaacccctgccacacagggaatgctggtctgttgtaaacgtgaaagaaggtggtgagaatatgcttgccgcatccctcatcagtctggctgctcctgtggacacaacccatccctcctggtccccctgcagagcctagttgggtgagctggactgcctctcccaaatccaggggcagggcccgcgaagaacagtcctgtggtgtcttaagggcagctacttgagttatgggtctctattcaagtggaagggaaatggccatttgccagccttcctgcaggattcaaggggcaagacaacttcaggaggaaattccactgagctgctgcctctatcggtagaggaccgttccctaaactccccccaacacactgctatcacccttcccatttaggtgcctgccagccccagctgacgatcaaaaatgcccccacttcagcccttcatactcatcccaccttccctggtaggtggcgcagggagccacagcagcaccctcagggagggaggacacttatgctgggtgggcttggccccctggggcacagctcctggaacagggctccaggcccttgcagctgtcgcccctgagctctgtcccccgtgtccactctctgtgccccagatagaagaggcaggcctgtgggcagcaggcccagcagatatcccagccccgctatgtgacctcacacagttactctgcttcccagggcctcagcatcttcagcctcaaagtggggacagtgccaccttcctttcaggcgcagtgtgaggcttggcaatgacacccatgactgcctagccagggccaggcacacggcagcccttcagagcctgcaagttcctccccttgcttcactatggccctggcaccttgtacgggggcaaaagtgcaagaggagccaaggtgtgttgagtgagtaagcaccttttccagccattggctgcgtcccatagtggggatgctcatggcttacggaggctccatgttctggagcatgatcttgaatcttgggcaagtggtttggtcttcctaagcctcctttcccaactctctgcctcttcttgcctcttcctgcagcctcctctcacagggcacacagtctggaccaggcactttacagaagtgtccacacttaatcctcaacaaccttccattttacagatacactgagactcagagaggttgaataacttatgtaaggccacacagctagtgcctggctggatcagggatttgagcccaggtccatttggtccccaaaccatgaacttaaccatgaagctccacagtccctctttccccatatccaaggtgcttattgaatgcaggttctgtgctaaatgcatgacaggttgtctcatttaagcttcacaatggaactctaaggtagggactattctatcttctcatccagaaaaagaaaccaaggctcagaaagattaaagaatttgtttaagggcaaacagctagtgagggatgagaacccaggactgagtcccaagttcattcttacaacactattccatctgaccttcaaggcccaggaggaagacctctgcgggaagaaagtctctgccttagctgatgtgtgagtaaccaaagcaaccttggcatctgccccccaacggctgcagaggcagactcctggctcggctcccttcttggctgtatagccttgggcgtcacttctctgagcctcagtttcctcctctgtgaaatggaactgaataatctatgtctcttaggttgctgaaaagaattcagtgagccatccggtgctgggcctgagcggtgctctgcttacacccagcctgctccctgaaccccactcccagagtgtacaccactccccgctccctttgctgtactctcctcctggggtctgcccctggccctctggaagggagtgacactggggaaaagcaggaggggggcagcagtggccgccccaggagggactctgccagccctgctgagcacaccccacaagcccaggtggggtcacagtggggaagcggtccttgccttttccccacctcttccccggctgcctgcgcctcaccattcctcactcaaggaagcacatcctccggtggagccaacactcacagggtcccttacagatccccctgggagcctgggaccagagcagaattgggttctgcagcttccaagccccaccctcaggcatagagtctgggagacagacctcatacatgaagggctctacgacaatacatgtatgttctgtcacttcttcctcgggaccttcctgaaccttcgtccacattctctctgtctcatcgattccctttaaagcccatctcacagtccatcattatctggcttaatcacttatgtactcactgtcacttccaccagaaagtagctctgcaactttgttcatttgccactgtatcccctgccgtctatagcaggtgctcaataaatgtctgctggacaggtgaatcatgttgatccagattcactctagttcagggaccacccacagggctaaggtaggtctccttccctctccccatgcttatccttgtctcaatctcagcaattccctgcaccccacccctctttataccatagagagattctggaagggctggaaaaatggtttttcaaaatcactgattctcatctctagtgtgctaggagagctcagtatttaaaggaacccatcagctaaagattttatttaaaaaggaggcgtcaggctgggcacagcagctcatacctgtaatcccagctgagggattacaggtgggaggctgaggcaggcagattgcttgagctcaggagttagagactagcctgggcaacatggcgaaacctcatctctactaaaaatataaaaaattagccgggtgtggtggcacatgcctgtggttccagctactagggaggttgaggtgggaggatcagctgagcccaagagttcaaggctgcagtgagccatgattgcaccactgcactccagcctgggcaacagtataaaatcctgtctccagggaaaaaaaaaaaaagcgctatcccgttggcaaaacgaatggccatccttggtatacttcggtttctttcctggtagctttaccaaaactggggcttatctgcatatgaaaatgggtggagaaactgagggaatctagaaaaaatacagagagaaagctgcaagggcttgccctccttcagaacatctcacctggatgtcactggcttagacaccgtggcagggccggggctgcattcctggtagctgttggggagacagcctgctgccttttatgtagtgagttcacaccaaagaacagctaccaagggaatgcagggcctctgctgtaatgaatagatacgttcatttataataagtgctgggttcacctgttttgtaaatggatgccattaagtgctcctaaatcaacagcgtctcctaagtgagttaaacatccctttttgcagtcatctttatgttactgatttaaacaacaccttcttttgtcccagtggaaggaagacctgacccaactccactgattgagaattaatggaggcaggacatgtgtgacgtgtgattcactgtttgaataaatctgtcattgagaatgtgtgcattcctgaatgtgctcaataacttcccagcataccttcccacctactatgtgttaggcactaggcatctcagaggctgcagatgtgggccctgccctcaggaaactcggttgggtaaggggagtgaaagtaattcacaattggcgtcaactacattcctgcatgagttcacataatcctgacagaaattctacaaggtgcggattgttttctgatttatcacagaggccttgaagcctagagaaggtaagtaatttgcactaagacacacagcccatgtgatgaagctgggattagagcccagtaggctgacactcagcctgtgttccttgcactccaacagttgtcctcaaagtggggtcctagaaacagcagcagcagcagcctcagctgggaatcatttgaaatgcaaattcccaccccccagatgactgtaatacctgcagcagtttaagaatctttgcacagggccgggcgcggtggctcacacctgtaatcccagcactttgggagactgaggcgggcggatcacatggtcaggagttcgagaccagcctggccaatacggtgaaaccccgtctctactaaaataaaaaaaactacaaaaattagccgggcgtggggcgggtgcctgtactcccagctactcgggaggctgaggcaggagaatcacttgaaccctggaggtggaggttgcagtaagcagagattgcaccagtgcactccaacctgggcaatagagcgaggctcagtctcaaaaaaaaaaataaataaataaaaaagaatctttgcacaacagtaagccactaaagccactaaatgcagtaataggagcaacctggtagacaggcaggaatgattgctagctggtggattagtcattcagggaaggcttcctgtaggaggtgatgcctgtcttgggatttgtggcatgaatgggaattcaccgggtggcccagcaggataaaggcattgcaggtacatgaagtggcaagggcaaaggcttggttaacttggaaaatattcctgtagttctgcatctacatggggcatgaagtgtggggatgggtgcgctgtggggcatgaggccagtggaccgagcaggagcttcatcctgtgagggtgtaagcaggagtgggagtgacctgggtttagttttcccaacaaccacatagcacctgtatacattccaattacttaacgctcttcattctatcaagaaaactttatatctgctccacaagtgaaaagccagcctcactaagcataaattgaattttcccatgaaaataaatcaacaaaaacaaaatgctgttataaactcctgctttgatcctgttatcagccccatccctgaggcctgctgtgttttgtttacaacacagattagcaagcacagagaatccacatgacaggacgccgccaataaaacagaagcatgctttttatatcctgatagggactgagatacaagacatagtgctacatgaaaaaggtaagctgaagaatgctggatttgggttacaaaaaaggcggacacatgcacgcagcacgcgcacacacacactctaagatgtccctggacagcggttgtctctggggaggggaatgggacgtggaagggcgtggcgcatagctcactgtgtacccttctgtatgtttaactgttgaaccatgactgtattactccctatataatcaatacattgcattaagcctttgtgggtgataaagagacattaaaggtctgtcagcatgccgaccctcctgtctgatgtcatcagaagggcggaaagagcaccggaaggagaactctctctcatgttccaggtggtatgctccatgtcaccaagagctgagcctgtgcctcacccggaatcgtttcgcggcctggatctcatacttcctgaaaccctgcttggtgggtaacaaggatctaagaatccattttgcgcaacaagaaacagcatactcaagcgagaaatgatttcccgactacctgaggtgggggaaggcagcctggtgccaggggcatgcagctggaggcctccacgtcctgttccactcttcctgggaacaagacttggctgctgccccactgtgtgcctcctgagctgtgcagagagaaggagaggcgcttgggcccaggagcaccttctgcacagggcaggtgtaaggggctgcacctctgttatctcctgtaatgctcccaccaccccttcaagtgggccctcttagtccataggaaacagaggcacagaggggttaaatgactcacctccaggccactcagctggtggtggcagagctgggaatccaacctgtttgcccatgcactggtgacaaagtctaggagcccctgagccaagtcagcctttggctggtacaagaacctgaccccacgaactaaaagtcttcagtcttgagacccagacggaccacttcaggctcctggagttgatccatgatgagcatccctcatgcaacacaatccacagacaattgtttctctagcaatttccataaataactgtaatttatgtgttaatagcaaagatatcaaggtttggaaccccctggagtgttaggaacatgatttgtaactacaaacacacaacaatttgttcaacatgccagctacatcttcagtaattactaccctggttaaggataattccacattcaatgccctgccatgcacggggaggggagatcaggagggaggggctgggatgggaccttgcctgtgttcctcacttcctcgaggccctttcctcttcctaagagcccttctgttctctcctgttttgggcctcgtctggtcctccaggcatttggacctggtgagcctctcactgtccagccctgcctgcagggacccaagtagggctgcgtggatgctccttcctgggaggagcactgtgagcagcgtgacaaccatggctgtcttagccgatcctgcctcttgacctcaggagggaccctgctccattatactccttccctctgcactttggtgagaggagccaatcaattctcccttcctctaagcagtgttcaggtgagtttctgtcaactgcaacccaagtgtcctgagagatcaatgcaggatggaagctcgcctcatctgatggatgaacgaggccccacagcagccactccaagggcagcagaggggtgaggcttggcggggtcgtgcttagggggagcaggagccagccagacctgggtttgaatcctggctctgccacttcctagctgtgttgctttgggcaaatcacagaaactctgaacttcaaattccttccctatagatgaggatagtaatatctaccttgtagggctaagtcattgataaagttagctatacaaggtgtcagactgtgtgtatggcattgccacatttgtgtttaaaaatggggggataacatttgtttctaggcatttgcttatgtatatgtgaaactctggaatcggacacaagaaactaataacacgagacatctctgggggggagaaccggctgctgggggactagtgttgtttcgtcacaattcccccgttccctttcactccccaagtagaaacaacagggggaacttttcaccatatacccttttgtatcttttgaattgtaaaccatgtaaataaacatgttagaaacatagacaaagctagataaaaaattaccattaaaattattctttatcataaagaattgtgaagtatgattgtagaattagctgtgaaatctctctctcatatatacatgctaatgccaggctgacaaaggacacccggaagagctagctgtggaggacccgcctcctgctgcctgtcccctctgcagcagcttggtgagcctcgagtccgccatggggtcaggagccgggtgagaccagcccgcatcctcttccccatctgcaccctgagcacttgcctcctggcatcccacaaggggccactgctgcctgttccatagatggggacactaagaccccaggtcacaggctgcaactggagatccccagacagctctggccccagatggtttctgtgtgacctgagctggatttggggcttcctgtgaaagctggatgcactgccacatggggcccacatgagttcctgcctgcccacctgggactggtgctgagtcactgtggtgccctgttagcaggttaagcactgttctgccaaaatcccccccattctcttttgcgccccatattggaacccaccatcagttgtcctttagcattttatcaaacacgcttaaaaaaagtataggccagtggttctcaagctttttggtgtcaggctccctgtacactctcaactgaggatcccaaaattgtttatgggtgtgatatctatcatcatttaccatattaaaaaattaaaattaagacatcatcaaccttgagacatctttatagcaaaagcctcagtctatccaccaacatgtcaggtggcctctagaatattctacagcacacttgtgcaagaatgatggtgataaggcaaacaacagctgcttgttgttatttaaatggtttgaactccctggaccacactttgagaaacattgccattaaagaaaaaaatgttcttagccacaaccaacgccagcacccatgccatttgcctggcccccgtgggtgtttaagtctaagccctgttctagaaagagagagaggaacatgctctgggtcctataggcagaactgactggggggtcccctttctagtcctggtggctgaggctgcatgaccctgctcagcaccacagcttgcagcccctagtactgacaggaaagagctgcctgcctgtggtggggctgttgttggtcacttcaggaaacaaaacagcatcagcccccatctgctgtgtgcctgccatgcaccaggcactggaggaaaccgaggctgtttgagaaatcactagtccaaacgttcccagcttgcaagagacagtggcaaggtgcgggcccaggtaaccctgtcctgaggctgcagagggaggccctggccgtggtaatcaaccttcagcaaggtacagctgtctgccctctctgggtgcttgtgcgtgggatggagggtgaggagtgctattgctcactgggggctcctgagggccttccccactgtaactcacttgcacctgcccctcctatgagacagggactttatggccagcattccgctggccccagctgcataatccagatctgaactgggtgctccagctccagcacctaagccccatcctctgcaaacaggggtttcacccaaccttccccaggttgggcatggtggcaaatttagatcagattaaaacgacagctcagggcacagctggtagagcagtcctcggaggggatgaaaggtggcgtggtgacaactgcagtctgggtgctggcttgggggcgggtgaggagcaggaggaagcatggctcactcctggcctgaccaaagcaatccccagccccacctctcactgggttggtcttggcaggtccagcccacccaccacctgtcaccctgctggagaactgcagcctggccttcctagccccgagacagagcggccaggatgaagtgatgccccagccttgagcagggtgcccagagggggtgctgagccagcccctggagcccactcagccccgattccaccttcttggctcagctccttcagggacgcctgggctgacctcacaggccacgctgggcaattcctcccagcacctgggcgatgctgttcagaggacaatttccctttccctctcccctctggacagctccgtgaggataagaataaggttgtccgacataccccacttatgcccagcctcagcacggcgcctggcacaactagctgctggataaatatttgtggatgaaatgaatatgcccagctcatgtatgtccctgtccccaaatccacatgcctttaaaaataaagcacctaccttcaagggggcaggcagagaggtaagggcctttcatacgtgggttctgggggatagtaacatggtaaacagatggtctgcacagagctgtcctgacccaaggtacagagtgccagaaacagctggaactgagatagggacccaggccttctctaagtcaggccatcctccagcccccaaggtcaggtccatggtccagttctctctgaaattcaccaggctgggtctaactcaagccgctcccatggatcggggaaggtgtttggagtttcctttcccctggggttaccagcagagtccctggagggagattctagacaactgagcacaggaggaccacggggagatagggaggagaccccatgcctttgctagcgagcatactcaagtctagtttcaccatccacatgtagggcccctgagtaaatttgtaaaaggcgccctcttctggtggatacagccccacaggcccagggctgagctaacaagaatgccattagagtgcagttgttcctctgccaactgccctcatgcagtgcacaacctgagtatctgtacatttgggagtgcctggagttctgccccacagggtgacagtgactctgggtacctgccaccctcccaagaccaacagtgaatgctgctcctcctttcagggggctgggaagcctaagggccatgcatgcacgacctgtagccacatggaaccacctgctgccttcctggggaaagataaagccccacccctcagccccctaggagatttacatggacaaagataagtcgcttacaggtccagaagtcacaagatcaagagaaaacatgttagccagacttagcactgccttcagcttcctcccagtgcactattaacacttttaaagcaattacatttttttttttttttttttttttttttgagacggagtctcactctttcgcccaagctggactgcagtggcgctatcccggctcactgcaagctccgcctcttgggttcatgccattctcctgcctcagcctcccgagtagctgggattacaggcgcccaccaccacgcccggctaattttttgtatttttagtagagacagggtttcaccgtgttagccaggatggtctcgatctcctgacctcgtgatccgcccacctcggcctcccaaagtgctgggattacaggcgtgagccaccgcgcccagccgcaattacatttttaagtagtcaaatttttaaggcaatcaagactgcatccctacatcacaggctttagcccaagtgggctgggtgaggtatggcttgcttgggtcttgaagggggcacaccctcagccctctcactgaggctgccatacacgctgggctcccacactgagtcaggagcccagagagggccagggctgcctcaaggtcacccaatggccagctggcagtcaggctgggcccgagtcaggtccccaggccccgcccttgctctagatccagatctgctggagcctgggggtgggagagctggtctccaacttgggccttcactgggcacagagacaccgttctttactgcttaacaatccccccccccccgccaaccgtttgccctgtgccaggctgcagctttccttaagtcctgctgacaaggaaaatctggtgccagcacccacaaatatgtgtgacttctggagggaggcagcagcctgggttccccaggccagagtgggcggatttaaaggacgggtggcagagtggggggggtcactggataggggaggaccaaactgcccaagtatgtctgggatggagggtgataaacgtttatatgtttttgaccagatacctgaaaaatactttccatgtttctaggggggcacatacatagtcttcactgcatattcttttataatgtttaagattttcatcatgggcctgtatttcctaagcaaatattaaattcatagatctaaacccatacataaatggcccaggcagaaaagaaagagacaggagctcagaatttcagaagatgaagggaccccagatactgaccttctctgtaaaaatgaaagctagggttgactgagtgcccatgggccttgcctgttgggccatgttttgaaagcccttctttaccatctcatttcagcctgagcgacctgaggagggagatgctattactgacatcttccatgctacaaacgaggaaatggagcaaggtcaccgcaggctggacccctgcgcccaggtcacacccactggccaaggctgacagcatgctacagggaaggctacgtcacaggctgggctgggagctgggctgggacctgaggctctggctcctgctctttgtcccgactttttccccagaggcctagagttccctggagccccaggtaacagcagccctgcgccagaggcaatgtgccttgtcagacaactgagagttccccgggggccaggagcagagcctgcagcttccttggggtcacacaggcagactactgagatgcaggtggccatcctcagcccctctgtgagcctcagtttcctcatctatgaaacaggtgaatctttcctaccttggaaggcaggagtaacgatggcccaagatgaggtatctgacacacagaggtgctcagcacgcactcattcccttcccctctcccctgcctggtgaacccgagagtgggaggtcggtcctctactggctgcgtcctgccaggccaggcatggggcaccgcctggggaaaggcaccagggtctagggggcaggctaacggctggcagtgaccctcccacccagaggcacatactaggcactgaagaggacgaggagctgggacgagaaccaggctggcagggtgcctgtgcgcatatgtgagctcatgtgtgctccccacaggggaccgagacccggcaggggcttgctgtgggctgtggcatctcccagatctcagctgccccaacagaccaagatagaaggagcttgggaggggacattttattttccagctagagatactaatagtggggctggcccatcccacccttcccttaccttggtccagtgctgtgggtgggggcctcctgccacaaacagccgcagcctggctggcttctcaggcctcctctgctgcccacacagatgagctccctcagccgtcccccatctggtgctgcggccagtgcgggtcataaaccctgagcccctgcttaatccgccagctcccgagtcagcgccagccagacacgtgacactgcagccccacagacctgtttggcaggagcagcagctggtcctgctgggggcggggagggctgtccgccttgccctcgccctgtccctaccacctcccagcccacagcctgcagttgggccactgcctgccttgtagcgagaggtatggtacgtgctgggggcagtgcaggtagggaaaagaacacggttctcaccaaatggtgccgggccacctgggaatgggtatatgtgtgcacctggggccgtgcatgtgcacacatgtgcatgtgtcagagagagagagagagaccgtagatgaaaatctattccaggtggattaaagacctaatgtgaaaggtgaataacgagaatcttcatgattacagggtaggaatgagtttctcaaaacacgaaaaatgttaataaagtgagaaagttgactacttgaattaagaattctgaaattgagaagtttatcccaacaccctgtaaagagtgaaaaaggcaggcaggagggagggagaagaggtctacaatgtggataactgacgaaggattagaatctgtagcacccaaagaagcctccaaatcgtaaagaaataaaaagacagcccaagatgggtgaaaggcatgaacaggcactccaccaatgatgaaatccaaacagccaatggacaaacaaaagatccccaacctcatcggggagatgcaaattcaaaccacagcaagaaaccattacccacccaccaggtgagtgaaaacgacaaagaccgacaatgcccagtgtggggttggggcaaggctgtatgcttgctttacagccagtatgtgccccagagacagctcatgccatgtgtgctgggacacaggttcaagagcaacagccccaaactgaaaacaacccatgtggtccatcacagtagactgcatacataagctgtggcctgtcgatacaatgaaatactatttatttaaaaggacagctgggcgcggtggctcacgcctgtaatcccagcactttgggaggccgaggcaggtggatcacttgaggtcaggagtttgagactagcttggctaacatggcaaaaccccatctctactaaaaatacaaaaaattagccaggcgtggtggtaggagcctgtaatcccagctactggggaggctgcggcaggagaattgcttgaacccgggaagtgcaggttgctgtgagctgagattgcgccaatgcactccagcctgggcgacagagcgaggctctatctcaaaaaaataaaaataaaaataaaaataaatacaataaaaataaaagaatgaacagcaacttattgcataggtgaatctcgcagatgcaactttgagcaaaaggagccagacctgaacaaatatccacagcctgtttatattcagctcaaaaataataaaagcaaaattatattgtaaaaagctgttccataggtggtacgacaggaagggcaagagggacattattagcacaaagtcaggatgacgacaatctctgaggagcaggctggggaggggcacacgggggctttgggcaatgctcagtctcttgacccatgcagtggtcacacgcatgttcttatttttctttaagctgtgcatgtttgtccttgcacccttctctatgacaggtgaccacatttaaaatagaaaggtacatgtgataagggtggggaaaggcatggactccaagctgtgactgcagagccaccaggcagcagcatccgagctagaagggctcatcttgctctcttatgtcacagacaagaactgaggatcagagacaggaaggaacttgcccaacgatgcaaagcaagttagaagccagcagggccaagactagaatctaggttaggcaaagcccaaaccaaggctctcctctctggtctctttggaagagttcttccattgcaaatcacatttaacaccaactggagcagatgggttgattttagcatttagcactccaaaattattttgtttgcttatgtattgtgggtctcttgccactagaataaaagctcccggagggcatggctttcggtctcttttgctccagtggtaaccccagcaccaaactgaaaatctggcacatagtaggtgctccataaatatttgctgaatgagtaaatgaatggagctgatgcttctatttgcactttcagatcctagaaatccctggtggcttctgtgatatcccaaaggagaaaacagaaaaacaactgtatgatactgacacactttcacagaattatcttcataactgccttaggaggtgggtaccatcatcaccccattttaaagaggagaaaacagggaggcctagtgacttgtccaaggtcatgcacaaagctaggaagctgacagctggaattcgaacccagcccagctgccttcaagcacccctaggatcactgaactggaagcacagaaaggctgaaccccatccatgactctgaagcccccaaaaggctggctggccctgggccactccacacacctgagcttaccacgatctgtgggattcagtccctcttgtcctcacccgccctcaaccctcctgagtgctggttctgacttctaaagtgtttttccggtctcttccaaactcgcagcccccagtaaggaagcctgggtagggattaggtcccccatgataaagatggggaagctttggttcagggaggggaagggacttgtccagagcaacaaagagtccggctctctgacctaaaggcctcctaagttagagtgacagacagagaccccagctgctgctcaaggattagccataagatgctcaattttcttcctggttccttttataccaaaccctcagtccacttggataagccccaaacctggtcctagttcagcatctggctgagctaaataatgaaatgctcccataatacccctcggcacttggctttattaaaacacgttggcacttttaggattgttacaaacctgtgttactatcctgatagctttccaccaagtccttggatcactgaaaaaataaatcattggctgtgggagtcttggagctaaaatggtcctgcagggcatctcagctaactgaaatttgtgaatcctccacctggcctcactccacacaccgatgagggaaactcactgccttctaaggcagcctgttccttgtttggattcagctcagtctcagtcaggcacaacaagaacttatatcctcccctggcactagggatgaagtaatgcctcaggccccactctgccctcagggagttcacagtctggaagaagaaattgtgtaagcacaactggataaggaatgacgcaggccagggttaccttctaaaaagacagcaggtaaggcccaagctgtgtgtacagaggtcattagctcccacagctggctttctatgctgtcacacacggcacgcagggatttatttgggtcagtctggactccgcgcacttgagtctgaagcccttcccagaggaatgccaccctgagggtgtctgggtacacagactggtaaactgctggggctctggggcaaccgagcaacgctgaaaggacaatcaatggtgcagcatcctacatcattccagctggcctgtgggattgacactgttttaatattatgcttcgagaaccatcatacaagggaatgataggtttgtggttttgcagacgaaatgggaaatacatgtgaaagcccctgtgatcaggtctggcatggagtagatgcttagaaaaaaatgctcgctgggtttgcactgcaatcctgctggattagaaagccacatacacagttctctgagtcacagttctctaagtcactgagaatttagcagcctgcttcctgcttttccaaactgacgcttgctatgatggccccactgaatagccccgaggcagggggtgagagggagtctggaagactggtatattaccaggggtctaaagtcagtccctacctgcgccctgctttgcatcgcccttctgttcagtgataatggtatccccgcggggaagattcagggactcagggcaggatttgccaaagaggtatcatggatgagggtgatgaaggatgaacggagtttgccagatggcaggggtggggtgttccttcccgcaggagccaaagcagggcgaggcgggggcccagtggaaaggcagggggctccagaaaatgctgctcccacaagcaggtttgcatctcactgcatggtggtaatgaatgctgatctgagatgcggcagtgcgtgggaccccagtctacacggacctcaccaacagaatgggcttttgccagcctcttgcacgtgagaaacacctcttgataggaatgagcagccccccactccccacctgcctaattatgaggggcagggggagtgatgagggctctggtcaactctcctaccagaggccagattcagactccctgaccagcacaaaggcagctccagcttgcacagcccagtgatgggcagcttcctacaagaacaaaggatggctgtattcttggctggggacacttaggtgcttaggtccaccccttataccaatggctgaaactgtgtgcaggaaagctgaggacacaaatggtcgcagttcttctggtgtggcctcagcactcccctctggacaatgggggaagggagcatgactaaaaccaagggtggtggtgtggggacagcaggcatgggacaggcagggcagggcaggttggtcagagcagcggctggaagggcgggctgccatgggccctttaagcagccttgaaagagagtggcaactccagtcatgagacccaagattacctaatgtttgcaaaccgtgcaggagacagtcccctgcagaggtgagcacaggccccctcccttgtccctccactgcagagacctctgaggggacaccgagtcctccgagcattccccaggaagcagccctctcaggatgactgggttgctggagagctggggacagggcccctcggctctgaatacgctgtgtgaccttggacatgtccctgcctctctctggcctcagttctccatctctaacacagtagggtggctccgggatgctccctccggcactgatgcttaatggctgggctgtgggcattgtggccaccccaagtcacctctcagtttatcttttcctgtggggggtggggggtgggaggagatggcaccgctaaggcaatttctcttctttccccttaaatctggtttctgggctctaattgcacatggcttcagcagcctggccatcttgccaactgtaatgaggaggtgggcatcatactgggggcaggggagggtgacgagaaagctattcctgtgtcaccttaattcagaattgttcagagggggctgcacaggccaatgtgtccactgcctggtggagcctgaccacaaaatgaaacggtggctcatcaaagtgcacaaccagacccctgctcccagtctaggacaggtccctcaccaccacagatcactgggcatgctcagagcaacactcacaaagctgaccaggcagagccgactgctgtccttgtgagcctcatctcctggacaaggccagggggaggggacacccactgtcacctttctgctccctttgctccaggaacagatcagctgtgacagttgagagcttggcaatttaaagtgacaactgcctggcagaaacatgggaggggaagttccccaggactattaggggtggggagaagcttgactcacctctgccaacccaccctgcctgcttagagcccaagggcaggtggttttgtagcgggaggttgcggtgggggcgggggtcccacactctaagaccctggcccaggagtgtctcatcctcaggctggcaggtgggacaggtttccaacaacagcccccattacacctcatccccctgctgccacctgccccctatgggtcagggtccagaggtcgccaaggctgttctggtccccaagactgctccctaagccaactctcctggaggtctaccgggagagctccctccaccccaagactgagaaccagtctcttccccacgtggtaatggcaggaggggctgcccaaggtcacacggggttgggaggcagggacagggccaggttggacccagccctccagccctgccaaagcttctccctccctcccaaggcgcgtccgtgtggctcccagcgaattcctgagatgcctcaacctcccgctcgcaggctcgggaccctggacgcggtggcgggatttctccgcccggaggcagcagcggtggtggaggcggggtgggggtggggaagagaagcagggtagtgcggagtcggggggtggggaatgctttgcatggcgaccctcggggtctggattcacgtacccccgcttcggggaggcaaccaactgcactgatgaagagatggagcaccccgcccctccccgacccccaatatcgcgcctttagcgttcgcaaggcttcgggataagccgtctgcatagccgcggaggttggggcttctgcgtcctcaccgctccagtcccagagagcgacaccgcagagcccagctcagaaagactggcgctggcgcgccccggcccccattcccgtgagcttggcggccgctgatccccaaccccacaaccctgcggccggtgcgggcttagcaactgcggcctcgcaacctccttccgagacccgctccgcgaagcccgccgcgatccccgcgcgccccaggttcccgagagccaactgcgtgtcggtgcaaccgcggccccgggggcggagctgccgcccaggccgccccgcggagggcattcccggctgcagccccagcgacccccgcccggggccccgcaccgcaccggtcgccgggcgcgtcccccgccggcccgcctcctacctcgcgggtccgcccgcagccgccgagagcgcgccgtccccgcggccggcgcggccccagagcgtccggtggccgggcgcgggggggcgggggcgggcgctcgggagccggagccggagcccgagcccgataccagcgccaccggcggggcggcctccccgcgcgccgccctcctgcccgccccaccgcccgtgcgccgtgaccttggcgggtggcctcgccgcgcctggcctcagtttcccccctcggaaggtgtgtgtgcgtgcgcggctgtgctagggggcggggaggacggtgccgccccggccgccgacgtcacccgagcctggacgagtggagggcgctcaggtcggtgcagccgctgcagcggatgggtcaggagagcggggtacgcggggtccaggcgcggaaccgggggcactgcgacccccggcatttccctcagactaccccagacccccaataaacagcgaacaaacgcacctcaggccaagtcccccggctcctccgagggaaagctgcagccccggccgaaacgccccacccccgccgccgtccccagttcgcagatgggaacactgaggcccacagcagggaagccactggcccagaggcgcacagctgcaccacgctcctccgcgtcccctccaggacacaccctcctgactgtttggggacggggtggggacctgggcctgccggtgccgcccccatccctcagccgacctcgatttagatgctgggacgggccctggtggcctggcgactgttacagagaatggggtgggcacaatcggaagggagcccaaagacggggaagaagtggcgcagatagcagaggctgggcctggaagggatatgggcgggagcgcgcccgcgggggtgcacctaaggagaaagcgaggacgcgcgagtgccctccctggtgggtcgcagagcagacctgccccggaagccctgaacgccgggccgggagcggcggcctctctcccgcagccggaaccccgccggtctggagcgagggcgtcaggtggcgggctgcgattgggacgaggcgccccctggtgcccggaggcggcgagaccggagaccggagggacggggccgccagggcccagccagagaagctgagcgagtgatgtcatgagtcaggagacccggctctgtgggtcctgccacgaggggctgtgtgaccttgggcaagacgtttccccctctggacttctgggaggaaaggacagaaggagggaccctgatttttacctctgacatctcatgaccctggacatctgggtcaggtgagaatgggcaaatggatccagaaaggcacagacggatcagaagtgagatgtagacactgttcagcactggaggaggattattcatttacttgaggcagaaactagtatcccaattttacagacaaggacaccgaggcagagaggtaaagtcatctgcccacattcacacagcagctaaggggtgagctgggatttgaacacccacctgcgaagctgtagcgtctaagcagtgtgcctgactgccccactccccactcttgcagaatttattgagcatctaagttgtccctagaatacccaaggcactggtgacagagacgaataaggaacggcccagctcctggtgggtcttcctgcctcgtggcaagagttaagcccatggcttcttatcagtgctcacagccaactgtacagtggatcccctgggaatgggcttgtgggctgaaatgtgagtcccatccccactgcatattctacccttccatattattggaggtttaaaaaatatttttaagggctaggtgtggtggctcatgcctgtaatcccagtgctttgggaggctgaggtggaaggatcacttgaagccaagagttttgaggccagcctgggcaacacagcgagactccatctcaaaaataaattaaccaggcatggtagtgctccagctactcgggaggctgaggcaagaggattgcttaagcccaggagttcaaggttattgcgagctatcattgcaccactgcactccagcctgggcaacagagcaagactttgtctcttaaaaacactttttttttttaaagagcagttaagggaagataagatgcttgtagttttaatatttaaaaatgcagtccctgagaagccatatacttttgttgtcagtgccaggagtaggtcacctggctggttggaaggcaggtgaggaagtgagaatgacaaaggttttagaatctgttggacctgggcaagtcccacgacttttctgagactcatttgaactcatccttaaaatggaactgaagctaaaaattcccaccctgcctcgcttccaaggctgctgtgagaattaactatgataatgtgtggaaagcctgcacaaaatgcactgtgtaaatattttcattcccaggagccgtgaaggaagatgtcgaacacttaactgcataaaaattaaaactatgtaaatggaatcaaaataccataaacaaagtaaaaaagacaaatggtaaactgaaaaaaaatgtctgctgcagcacatatgacagaatttaattgaggaaaatgcaatgaaagttaatttctctaatacataaacaggtctttcaaatcgataggaaaaagatgactaacccattagaaaaaagagcaaaggatatgaacaagcagctcatggaaagatcttcaatctcacttgtaattaaatgtatattaaagaaatacaaatcaaaacacaacatggttgccattttttaatctaccaagttggcaaaaacgaataagtttgctaatacttttgctgctaaaggtgggaagaaatgagcactctcaaaaatgctgtagggtgaggtgccagatggtgcaaccaatcgggaagggtatggcgaagctactacagcatgctaatataaaaatacaaggacagacaacacagcactgtgtgtaccagtaaacagcgaaagaaaagagccatcttcagggtccagcagtaggagagggagtaacttcattaagatacccattactgggactttgtcctaggatggacagatctccaggtcatatttctactgaaaaattcaaggaacagaagactgtatatcatgatccttttgtgtacaagttaaaaggctctatgtagatgtgtgtgggaatttcctaattttcccaaaggacacaaatatgccgaaacaaaaaaactcttattgatggataccttttgggaggactgaggggtgcatggaatggatatgtgaggcgcttttacttttcattttatacttttttgtaataattgatttttaaaaggtcaacaggggttatctgggcacaagctgatgggccaattgaagtctcttcttgacatgtctttatatttaaacaatcaggtttgcagtgcttaatgatggggatacattctgagaaatgtgtccttaggtgatttcatcattgtgaaacctcatagagtgttcttacacaacctagatggcacagcctactacacacctaggctatatggtatggcctagtcctcctaggctacaaacctgttcagcatatgactgtactgaacactgcaggcacttaatcacaattattcccttggtttcctccatatacagttattccaaatcaataagaaaaaaacatgaacaactcaaaataaaaatgtccaattaatttgaccaggtagtagatatttgtgtatctaaacataacatagaaaaggtacggtaaaaatatggtattatcatcttatgggaccaccatcatatatgtggtgtgtcattgaccgaaatgtcataatgcacattactataaatgtttttaaagtgaataaaaattattgaagtattcttgttccttaaagtccaccagtgagggatttgttaaacagattataattaagacacatccatatgatggaagcctatgcagccatcaaaaagaatgtggcagctctacggccaggcacagtggctcatacctgtaattccagcactttgggaggccaaggcaggtggatcacttgaggctaggagttcaagatcagcctaggcaacatggcaaaacaccgtctctactaaaaacacaaaaattagctgggtgtggtggcatgtgcctgtaatcctagctacttaggaggctgaagtgggaggatcacctgaaccaggggagactgaggctgcactaagctgtgatcactccactgcactccagcctgggtgacagagtgagaccctgtctcaaaaaaaacaaacaacaaaacaagacaaaaacaacaacaaaaaagtggcatctctacatggactgatatgataaggaacaatccccaagatattttggtaggtgcaataaaggatgtagggtatgttactttttatgtaagaaagagggagtaagccaggtgtggcaactcttacctgtaatcccagctgctcaggacgatgaagtgggaggatcacttgaggccaagagttcaagagcagcctgggttaatgtagcaagggtccctcttaaaaaaattttttttaaataaaaataaaaatctggaattaaaaaaaaagagggggtatagaatatctgctggtacctgcatatgttgtctctgacaaagatgctcaagaaactggtacatggttttgccatgttgccatgccctggggaaggttctgggtgatgaccgagggtgaactgtggagacagtggggatggagagctgcctgctacacttcctgctttgtgggcagctataaagtggggggtcggggggcaggatcaaggccaaggctgatctctgggtaggttgagtggttttgtttcccaacatgaagctttgcccccctagacgtcttcgtgccctgggggatggagtggaaaggagactggcttttcactgaaatgtttcatttaagtattttttgcatgtattactacatgcatgtattactgtttgtaaaatattatgtttaaaactaatttctgagtggggagctgagaagcctgatttctaagagcctgctgtggcactcaggatgactccccgtgtgacttcaggaaggcaggtgtcccttctgagcctcaaggtcccctctatcaagaagcataagacgagtactaagactccttacaactctgatgccataccagctccagaaccttctccctggaagagccacttagatatggaatggctgctggggaggtagggactccctgtccttgggctcatgggagcagggctgagggtaaactgccttgcatgacttctaaaatccctcccagctcggcagtgtgctgttccttcttcattctcccattcccagtgccctgcctggaaactcttagttcatatttcctctctaggttacccctggcaatggtctcgtctgtctgggttggaggtcagtcctgtggtgtggggacagatgacacagcactgggcgcccacgtggggcggggacatctaggggaacaaagcgtcatgttgggaaacaaaaccgctcaccccacccagagattagccttggcctccgtcccgccccctgcactttatagctgtccacaaagcaggaagtatagcaggcaactctcagttcccattgtctctgcagttcaccatcggtcattacccagaaccttctgtgactccctactgcccaccaaaccaggtagacactcttcaggggacattcaagctcctgtactttctggcctcaatttgtcccttctagctcttcactctgtccattattgtcccttatcaaagtaattttcaacaatacacattcgatcacatcccttccctgctctaaacgcttctgtagctcctatgtcctgtgtaataaagtccaagctccttaggaactagcatttgcctccctgcttagctctatcttcaactatgtctctcaaaattaggctaaacctaatgcttttcaagcacactgtactatttcatatcattgtgtattagcacatactattcccttggtttcctccatatataaagagttattccaaatcaatcaaaaacaaaaaaaatgaacaactcaaaataaaaatgtccaatcaatttgaccaggtagttcagtgaaaaagaaatacaaatggcctgtaaacattcaaaaagatgtacgaccttacacagaaacacaaatcaaatgataatctcattttcatccatcaaatgggcaaaaattcatagaaagctcatgtctctttgtatattagctgaagtccaaacccatcctttaaatccagctctaaaaatgtcacctcctctagacgtcatcttcttggctcccacagtgtcctgtacatcttgagacagtggggccaggtacagagcagaaattctatagatgttagctattattaataaaaataacagctaccatgctgttctgtggtcatcagctaatggttctgtccacctgcccagaaggtccctgaaagcaggaatagagtctgcttcatcactgctttactaggacgagcacagggcctgctacagagccatgccctgtaagcagacaggtgaggtatatgcagcagagggaaggctgaagccaggagccagccctcaagggctgccctgctggggagagtaggcactgtggaggggagggctgaaggagggccagttggtgggcacagccccaggcttgcaataaacacaacttccatgaactggtacccactttgtgtcagagagcactgtgccagatactttatccaaactatctctattcctgcagattctttgagatgggtggtgtgccctccattttacaggtgagaaaacagaggctcaggaatggggagtgacttacccaagtgagtcttttttttttttttttttttgagacagaggcgtgtgctgtcactcaggctggagtacagtggctcgactttggctccctgcaacctctacctcctgggttcaagcaattctcctgcctcaggcctcccaagtagctgggattacaggtgcttgccacaatgcccagctttttttttaaatttttttatttttagtagagatggggtttcaccatgttggccaggctggtctcgaactcctggcctcaagtgatccgcccacctcagtctcccaaagtgttgggattacaggcatgagccaccatgcccgatcctaagtgagttcttatcattaccccacactgcctgtgctggcttgtgggcacttgatagatgcatgaggttggacatttcatgttccctatctggaactctgctctcccgtctgagaaatggctctatattaggggtttctcaaacttaagaactgatgggcctctaagaatacagttcccaagctccatcaggccccaccttttagaaacactgcatccagtggtaaacgctgctacactggaaggtcctgtgatgaccacatgttcataaagaaaaggcagccacgaacatcagggagcagagctcagttggtagagggtcgtccagatgacctgcagcatgcttttgttaaaatgggggaggagttttcgtcttcacgaaaatgatgtttaaaaatgtattgtcttggccttagctggagtggtcaaaaataataataaatattgtcaaatgattttttacaaggtgccaagacaattcattggaaacaatcatttctttaacaagtagtgctggccgagcgcgatggctcacgcctgtaatcccagcactttgggaggctgaggcgggcggatcacctgaggtcaggagttccagaccagtctggccaacaaggtgaaaacccatctctactaaaaatacaaaaatcagccaggcgtggtggtgtgcacctgtaatctcagctactccagaggctgaggcaggagaatcacttgaacccggaggcagggtggggggtggcagaggttgcagtgagctgagatctaggcactgtgctctagcctgggtgacagaacaagactccatctggaaacaaacaaacaaacaacaacaacaaaaaacaagtagtgctgagacaactggctatttatacacaaaaggatacatttgggcccatgcttcccaccatacacaaaaattaactcaaattaatcaaagacctaaatgaaagagttaaaactataaaaatcttagacaaaaacataagaagaaatctttgtgaccttgggttatacaatgatttcttagatacaacaccaaaagcataagcaagagaattacaaattcataaattggacttcatgaaaattaaaaacttttgcacttcaaaagacaccatcaagaaagtaaaaagataaggccctgcataggctcatgcctgtaatctcagcactttgggaggcagaggcagaaggattgcctgagcccaggagttcgagactgtagggagccatgatcatgccattgtattccagcctgggtgagtgagtgagacctgatctccaaaaaaaaaaaaaaaaaggaactgagaaactgagaaaattatataactgatactggaacctgtatgtagagtatgcaaataactcatgactcaataacaaggagacaatacaatttttaaatgggcaaaaggtttgaatacacatttcatcaaaggagacatatgaatggccaataagcacatgaaaagatgttccacatcaaagaaatgcaaatcaaaaccacaatgagatatgacttcccacccactaggacagctagaagcaaaaagccagacaataacaaatgtgggacaggatgtggagaaatggaaaccctcacacaccactggtgggaacaaaaagatgcagccactttggaaaacagtttggccatttctaaaaagttaaacagagagttactatgtgacccagcaattccacttctaggtatctactaaagagaaatgaaaacatatgtccacatcaaatcttgtatgcaaatatccatagtagtagtatttacaatagccaaaaagtggaaatgacccacatgtccatcaaccggggaatggataaactaactacagtgtatccatacaatggaatgttattattcagcagtaaaaaggaatgaaagaccaggcgcagtggctcatgcccaacattttgggaggctgaggcgggagtgtcacatgaggccaggagttcaagaacagcctgggcaacaaagtgagacccctgtctctaccaaaaaaaaaaaaaaaaaaaaaaaggaatgaagtactgatacattctattctataacatggatgaaccttgaaaaacttcacgctaagtgaataaagctagacacaaaaggacacgtgttgtatgattccaaaaggatatgaaatgctcagaaagacatatctacagagacaaaaagtggttgttgaggacttgggatggcacaagggactgagggaaaatgggtatgtggtttattttcagggccatggaaacgattaaaaataaaattgtgatggttacaggattctgtaaatatagtaataataaccgaattgtacacttaaaatgagtgaatttcatagagtaaagtatccctcaataaagctttaagaaaacacgtgatgactaaatgaaacataagatcctaggttgggaggaaagcttggtaaaaaggacattactgggacaacaggcgaaatgtgacttttaagttagttgtattttagatcctagtatcatgtccatgttaaacttcctgaatttgactaatggaccatggttatgtaagagaatgtccttgttcttagtaattatgtactggagcagtatttaggggtgaaagttacatatggcatgtttgcagtgacatctcaaatgcttctaagggaaaaatcggtttttaagagaaagcaaaatttggtggaatgttattagtgatgagtctgggtgaatggtacacgggagaattttgttttgtattattgttgtaactcttctttaagattgaaatcacttcaaaataacttacaactcttaaagaatccacacatttaaaaaattattgttgggaccttgaataaatctatagaccctgaatggagaaaaagccctgagctagttgtgaacagagttcctagagagggtgcccctgctcatcatgtctgttgcaccccaaagagaagacaaagacacagccagagggtagggtgagagcatgtgtctgtatatgccatagcttgcattcattcagtcatttacccaacaaatatttcctgggtgccatcatgtgcaagggtaatcagctgtgaagcagagatgatcaaatccctgccctcaggtgttgagatgcagctgggggccgggggagcgctctgcaggagggggaagccgatgtggaaacccctcagctacacccaggccccagcctcccaccagatctggagccttggagggcagggatttgtgtctgaatcacctctgtgcactctccccgcctccctcctccctctccttggattataaggaagtcaaactgtctccacacagcaaagagcttttgaccgctggggcccacaggcttcgaaaggcccagagcagggacagggcatctatgcagggccactttccaccagcaaagctcagaacggaatcagcaagagtaggtgggagggagggtggctgggggctgtccaggtgaggggctgcagggatggagggaagcattatcaaggggggaggctaattcacctcccaccaaaaacccagcatcgggccagccacagtgctggccacgcaaatatccacgaggtagcctccacctccaccagtaagcccttgactcctgggagctgctcagggactccagctcctggaggttacacggattcccaagctgggaacccctgaattattttaggggatctctcatcccgtatgtgcagccaacactgctggtagaccaaacaaatactatgtttcacacgtgaacatctttcaaaccaaaatagaagctgctttgataaataaaattcacagactccaaagttatctaaaaattggttcttaacagcttcctgtcatcctgtagtttttcaatcttggatattaacccttgtgtgtggggttaatatggcatgggggcagggggtgtctcataatttctgatgataaacaggtctcttccctttacttgaaaagcccgggagtgcaaatggagttcccatacttcacggtgtgggggaaggatcagaggatgaggcctgtactgctggacctcgggtggagaccgcagcccagggctccctgctctgcagggctctggaagatgaggggatctgggggcccagagccaggcaccccagtgttactggcctgcctgcccccagcagaccagcagtcctccaaggcagcagctgggccaaggctgagtctctcaggagtcctgggcagtcagcacgtagctgggtgaccacggaggcaggcaggcaggaggcgcctggacaagggggctgacattcacagcaggctgggctggctgagggctttgagcccagctctccacctgctagctgtgtggccactgagcactcaggatgtggctggggtgatggagactgagtttttcattttgtgaattttaatcagtgaacatttaaatagccacctatagctggtggctactgctctgggcagcctggctctggaggcttcgtagggacggggaatggaaatggccctgaaggtgagccagccagcttagctccccctcccttctcagcaaggatttgagggtcccccttgcagagcaaaggctgcagtgtctggacaagcctcagctccctccctggtccggtccaggcatctgcacacatcacagcacacagagtgccactgcccagagcagtgcacacaaaaccaggtactctgtctgatatgagcaacttaagggctcttcaaggggaattttatgatagtaactttttgactttgtatataatgactttagagcttactcccctcaccccaacctgtgtgaaataacagcccagcaaaatcctaatgatacatatcttgtgattgccaaatatgaccacaaattcctcccatcctggtacccaggcctctcctgggtagccccctcctcccacctgagctgggggctacttcccctccccttgggcatacgactttcctttcaggagaaggtggcagaggtgatggctgtgcctcaagaggcctcacggcttctggttcattctagaagtgcagcctcagatgccatgtggaaggtgtgattggggcacgtggagggaactgaagggaccccggtgtgagaggcttgtctgccattgtgggggccatgtggagggaactaaggggacccccatgtgaggaggctggtctaccattgtggtgggggcacatggaggggcctgagctgcctggccgccagccagcatccactggcagacatgggagtggggccttcttggaacttccagcccagctgagcatagccaagggcaaccagcacaactgcccagatcttccaaacacacaatcacgtgttttaagacactatgttctgtgtagtttgttacacagcaaaatctaactgaaacacacgcgcacacagcccccactctagagactgccagctggtgttgcagttcagggcccacccacggccccaggaggcagcagcacacccggaagcactgcctgggcccaggggcaggggcatgagaagtgtccatgggccgctggggaactctaccttttaaacagagcagaaacccacgtggagcccagagacaggccgtctttggcagatgcctggggtctgtgctctgggccgggctctgactggcggagcccctgcagcctggcctctcctgacatgtttgcagtcaaaatcacaaagctctgctaccggcgggtatctctctccccattttatagatgaggaaacagattcaggagcaggagacacttgtccaaagtcggttttgctaggctttgtcctcctccaggtctttttggcccccatccctgcagtggtaggggtgcccctaattcacaagggtggagtgcaggagaggaagctggcaggggctgcatgagactgtggggagggaatcacgtgtcttcatgcagacagagcccaaggcacttagggtcgggggacagaacccctaggaagagggtcaggggagctgcagcaaggactctgtctccagctggtatgcgggatccagacagagcaggtggggctggctctgtaactggcctgtcggccgttctaaacatccagagaactgagtagtggggacgccagctgtgggcccagctgcccctgggaggagggcagaggccagcctggctctctacctgccccacccactgcaccggtccaccctccgtgtctctaaggaaagctaggttctaggtctcaattctgatgctgccactttctggctggcaaggaacttgcgcgagtcacttggcttgcctcagtttccccccctgcaagatagggcagatattcctgttggacaggatttattgtgagaatggaatgagatcatagttgggaccatactcctacacacattagagcttatcacccatttcgcacttgaaaaacatcccgttttctttgctgctgcttgaaagcctccgcaggccacccactcctcacttctgggtctgcctatctctgcggtttctgtgcttgcagatgaaatgtaattcttggctgttggaagtttggggctgagcccagccatccctccctgtctctggggccccacccgtaccccgccccagagtccagagcccccagcacgtccagcttaccaatggagcccacccttccccggagcaaggtcacagaatcccctgtcctgtgggaggagagcttggtgatttctcaaagtccttgcagctctgaccttctaagcctgcactcctctaggaagccaggtgagagagcagaggaactacccttccataagcccaccccaggaaccccagggaggggccaggtgcctggccttctgagtgtctgtacctgaagatgaaacggggttacttaggtacttcttggcagttctgaagttcaggactgaacctagctgcctctcctggctatgtccgtccattaccatcaccaccttgtcaccctccgtctggggtctgaggccaagctggacacctctccttcccgcgtcgaagctcagaggtgagcctcagctgaccctccctccagcaaatgtttagagaatgaggtaagcatcctccaccagtgaccgtcaggctgtccactgtccaacccagacgtcctctctgagagtgctgccattagtctccaaaccctctgtcctttgagcctgaatccccagggggctgttcatactcctcttccctctgccacctggctggcccccatctttgctagccacctccttcttgctctcagttcccctcctcagggaggccctcactgaccaccgccaagtcgctccccactgcagcctcctgcttcattttcctgactgtgatgttggaaatgctcgtttgtgtgtttgtttacttgtcacctctctgcctcccccaacccccaaatgccagctctgtgagggagggggtctcacgctggtgtcctcactgctttgagcggtgctgggcacacagtcaatattagttggtcgagttactgatagaacaacgctcttgatccggctccagggcagaaaggggagctcacagaggaggggatatccagctaacccagtgggaaccagacacgctggcaaaccccatcccacgggctaggctttcagttaaccctctcattcatgcatgagggggtgcttattaagccattttccagataaggcaatggaggcccagagaagtgaagtgacttgcacaaggccacatggcttgtatgctgcagagctgggtcttggcctggctttctgagatcgacagcccttttcctctccagggttccaaggctgtgattccgagagatcaccacacagggaaggaatcctgacagcctgtgaagtgcctggcactgggtcaggttatttgccaaggtttgttcatgtgcctgctctgtcttcataggtctattttacagatgtcaaactgaggcccagagaggcctggtgactcgccctaggtcacacagtgcggtgacagccaatccaggaccggtgcccggactgccacacctctccatgtggtggcggtgaagctaaatggcctgctgccttgatttcccctttgtgccatgagggtgtgggcaggctgatttctgacatggtgtaatgtcatcagggaggcgggaccttgcctgagaagccttagggctgaaaagggaagcgcagagtggctgtttccccatcctgcccgctctccgccctggccctgagccaggtgggcggccaactccctttgaccacttcctggggtaactcccccggaaatgccccagatgcccgcagcccaagtataactccaacttccaggctcaggaccctcatccctcacctcctcctgccaagatcaccccaagcagaaaccagtaggcataataattagtatgtttgtatatatatatgtgtgtgtgtgtgtgtgtgtatgtactttgctgattagatattttatcagatatcttatctatataaggaaacaacaacaaaagtgaagctgacagtgcgttgagagccgggctttagcacaccacagctctatgtcttaggatccctcctctctgccagtgtggcgcccgcctcctactcccatcctctgcctccagtctcctctgccagcctgtcctccatccaagctccctaggcatcctcttcaaactctttgctgattgctgtaaggcagtggagcatgtggttaagattctgggcttcaggtcaagctgatttgggatttgaggacatttgctaacagtgtgaccttcggcaagtgactgtgtctccctaagcctcagttttctcatctgcaaaatagggatcataacaaactctacctcacggggctgacccgaagggatgatgcatagcagaacacatggctcagctggccagccggcaggtcttagcaggtcatagtggcggaatgaccagcccacaagtcttagcaggtcgcaatggtggatgcaggatgtttctgcctgaccagcctccattctcacttccggtaagacaccccaattttctttggggaatccaatcctccattctcagtccatctaatttgggtcagctacctccaggggtgaatgcagtaccgagcttggtctatcagagagagtagttcatcccccctgctcaagtgactggtccagggatgggtatgtggtctaagctaaccatggagagtcgattctgtcagaacagtttctgcctggatatgacaaatgtcgacctggagctgttggggccatctgggcagaaaggctgtccgggaatgaagtcaaagagatggaaaaagagaaaaagaggccggcgtctggggtcatggtttgagcccccgaatccaactgtacctgaagccctgtctgtttcagaaacagaaggcaataaattcagcctttgccttaagcccgtcaagccagtctggggtgcctcttttttttaatcaaccaaacaaatactggttaataaaactccctgctcaaaagctcctggcggctccttcatgcctgcagggagaggccagcaccctgggctctgggccccacttgccttcctttttgtcctgaactctggccctcatccctcccagacaggtatcacccaagactgctgtttcccaaacacaccatgaagactcgacctacagtttctacccaaactctcctccactccccacttgagcagtgcctgctcactagagcttgcctcctcctggaagcctccccacacttcctccaccactctgagtgtcagtggcatctacctccagcttcccatcactctgcttatttccccagagtgaaattcacttttttttttctttttcctcttcaaaaaaactttgtctcactgtatcatttaagaaatgaacatcctggattgacttgggatttgacaaattcaaacttggttttaacacaccatgtgcatttcctgagccccaggcgtaccagcagacacagggctgaaagacccagggcctacccgcaggggcttagaggctgaaccaaaccgtttcccatttggctcaagacaatggatgcaaaaatgaccatttttaaaattttaaattcaaatttattttacttggggataatcatcactgacactcactgagccattgctaggtcattgtctatgggcaggtccatgcataatgttatttaatcctcactctgggaaatgttatcctcacttacagaggaggtcactgaagctcagagaagtaaagggagctgcccagggggttacagcaactgtagggagctgaccctatattctagcccttgttatcctccctggcctttctcaactgtgtgcgaatacactggggccagcttcgaagtctttttaacattcactgtgtaaactcggcaccaagctagcttcccctggttgctcacaggcaggtggctgtccacacccacttctgtgtgggggcctctggcgtcacatttcacacccctgttctgtaggcatcgggtttcagatttgctgtatttgcttccgctgccactaccggtagatcagaagctggggaggtgtttcaacacatgattgttttgaatatggtgacttccccatctatccctgccatgggtaacatcccagcagcctcttgatagcagaacagaggccattgagcctggccaatgagtgagtctcaaattctaagttcgtgggggactcacttaagaagggtggtttgttccagcacctgatcagaacctgtggctcatcctctgcaaagtgggcatgaggcaccaccagaggctgcggagtggccagaatgaggcaacatatggagggggtgtggcacacggtaggtgtacactaagtgctcattccctcttttccttacagccttgctgctggggctacctttcacccacatgcaggcttacttgcctgcacccccggcatggcccaagaaccagttctctgagttcagccaggacttccaagaacctagcacagccaggtcagctccactgtgtatgagtcctgaacccgaccctaggcccctgctccctcagttgccatttgccaggctacctcctccattgctcctaaaatctagctcatctgccacctcctccaggaagcctttggggaactcctccagataaaaactccagtgtccctcctctgggctcccacaggcctcagagctcacccccttctcagccctgagtgccatgtgtagtcatttcctcttttctagtcccttctcccacagagcactgtgaacatccccaagacagaaacgatgtgttgctcaccacagcctgggccctacagctggcctgtcacagggctggtgacgaccgaatgaaaggaaatgcctaatgttttctgagcacttgctacatgccgggcacagagccagggatgcccacatggagagggcctgcctcacagtgaagacagtaggaaggaaagcagaggtaagagttgaaaagtccaaatccatatatgaacactgcgattccgccattcccgaagctagttaccctccagacttttcagttccaggaggcaatgaaaccccttttctgcttatgcccgttaggtttggattttctgtcacttgctactaagacagccctcactgaccaagtgaagctcagagatgggacccaacacacccaaggtcacatagctacgaaagcagtggaacagaaactcccatgaaagtctgggcttttttttttttttttgagacagtcttgctctgtgtccaaggctggagtgcagtggcacgacctaggctcactgcaacctctgcctcccaggttcaagcgattctcctgcctcagcctcccaagtagctgggattaccggcatgcgccaccacgcccggctaatttttgtatttttagtagagatggggtttcaccatattggtcaggctggtctcgatctcctgacctcaagtgatccgcccgccttggcctcccaaggtctgggctcttaaccacagcctgaccacaccccaggcccggctgatagccacttcaatgctcccacacgctgagtacagtccagatacccactctgccggcggagtcccctcacctctttcccagaagccactggagttacactggttgggatttttgggcattggtttgcaagtccatcagatggggctaatgagctcacccttgcatgcaggtcagaggacagctcacactggcctagcccacaagggactcagggaatgaaggccacagtgtggaccctccaacctgccctcagctgcctgatggcctacaggtgttttctaataggtgacatgtgtccattaaaataaaatacaaccaaccgcttacccctccttgcgcccatctccttcctctgccctactctccttcacagaacatgtcatccccatgacctatcatgcatgcattgcgttagtcatatattgcttgactccccaacaccaagaagggaagggatggtttatctgatttatcacctttgtactctcagagacaagacagtacttggcacacagtaggtgcccaataaatgtttgttgaatgactgaattaacaaatgaatgatgtgcatgaaactctgcacagagtcatggagtgcttaaaggctcctggttacacctggccatttcacaggtgaggacatgaggcctcaggatgggctcccctgaagtccccaggcaggcagcaggggctctgatctgctctgtgcctctgctgggctggaccgaaatgggccttgaacacaggtgtgggcagccacctggccaggctccccagcttgagccctggcgcccaacaaaggcaggttgctgctggaggtagctgagctggaggccagagccctgggctctgagctgtaacccctgaacctgacctcttggggtccttgggccaacagcccctggctcactggggtcatcaagcctcccctaaccagcctgaggggcactgtgccctggtaaatctctcagtgagatgggaacccagagtcacctacgcccacagggagattccccacagaggcctgcttcaccatctaagcctcacaacaaccccggaagggaggactttcgctatgggttatatggaaacccaggcccagagatgttgggacatctgtcccatgtcacatggctggggcacactggggagctgggatttgagacagagtgactgacccctcagggcactgagcagccttctgtctgcagcgtgggggcaggggtgaaggtgcccattgcttccttatcactgggcctcactttttccatctgccactggttgggctccagtcctaaggaaagggctatctgtcttgcctgcccccaagagccagggctggggtgggggaggcttggctgggagtgagagctcccaggctgctccctgaggctgggtcggtaaaagcttcctctgacccatctgttgaactccctgatgaccccagtgagccaggggctgttggcccaaggaccccaagaggtcaggctcaggggttacagctcagaacccagggaacatcccccaacacgctcccagccccagggatctacagatcctcaaggttccactctggatcatttcagaaagatactgaacttgtcagtgggtcaaggggctcctggggggacacatactgggctactgccagatgggaaatggccccagcgagcctggggcagggaagacttctgcaaggcagtgtctcctcaacacagcctggggaagccttgtgttccctcagccataaacctccatttgctcaaagtttatgcaccatagggttgaggggggcagcagtgtgggaaggaaacacaccaaatatgctccaggagccctgggccactgtgtgacttctgagggcctctgaggacttctgacttctgtgtgacttctgagggcctcagtttactcggctgtaaactgggcattgtcaagagtccatctttctcagggtggttgtgagggccgtaggcagcgacccaacactccctgccatccaggtgggctgcggggccctggttctcaaccctaatggggcctggggctggtctaacgcgcaggggagctaaagaacttccccttgcggctgtggggaaacacctggtgttcctgggcccagggcgagcctgtgtgcattccaggcagtgagaaacgggtcacagaatacagctctgagaaacagtgaaaactctgacgacagcccccaagaccctcaccacggcaggctgccctgacagtcgccagcccctcacaggtttctcagggctgctgaggtcccctccccgggccaggtgggtggtactcacagtctcaaagtggagggggcggaggtgtccctggaaccccagtgcctggcctgcctctgcggccccgggggatgagctgtgggtccatccccacagcaggtcctgacgtctgacttcctccctgctcagtcggcatccaggaaaccacacccaggggagagggtgccaggcaccctggggcccccgcccacctgccctccaaaaggcccccaggcactgctgagggggctccttccaggtctggcaaacccaaatggcttcactgggcaggccccagtcaataaataatacacccacctccctggacagtctctggtgcctgatcgtgtttcagggccacttaagttccaggcagactgctttgttcagagtgccgggccccttctgggtctctggccacatgggcactgcactgtcacggagggccagctggagccagcagcataaagtagtgtgacaggggtccctggagagagggtgccctacttacttagcagcttgggcccaaaggggacccaggggtggtgccagggtagggtggccagtctcgtctccccatggccaggcagggccccccacatcccccacaggggtgccatctggagagccgccaccagcccatcctgacattgccagtgtccgggcccaggcccctcctccaggaagcctcctctccgccaggagtgctctgtccctgtctgaattcccactgcaaccgccagccagtctgtctgtctccttctttgggtctcaattgtcatctctcatctaaacagtggccggccgccacatctcaaccggccttccctgcccccaacgccccaccactccctctccacagtctcatttcctcacagcagcccgggtgacggttttaaaacagaaagcacagcaatgttacccagccgtggctctcccgccccagtcaactttcaagccctctccaggatctggccctgccaccacggggactgctcctcccgccctctcgactcctgccagcctcctcctctgtgctcctcctgcaggtgcacacagacctcagggtccttacaccagctgctctctctgcctgctcttccccaaggtcctcacaaactcactccaccctgtcactctcaacgcaaggccaccactgcagacgagtctttgttttcttttcaaacagtcttattaagatataattcacacaccatacaactcacccatttaaaatgtatagttcaatgattttattaatagtatattcccagaggggtgcaactgtcaccactatctatgtttagcatattttcatcactcaaaaagaacccctccccagccctggatcacggcaaacctacctcccgtctctatagatttgcctgttctggacatttcctagaaacgggaccatacgctctgtggtcttccgtctggcttctttcacttagcatgatgtcctcaaggttcacctgtgctgtaacacgtgccagaacttcatttctttttgtggctgaataatattccacactatggacagaccacattgtgtttatctattcatccactgacggccactgggagaggcccttcttgacctccccaggccatgtggctccctctccccgatcactctgtcatccctccctgttttattttcttggcaccgatctttgcctgaaggcatcttcatttgtttattttctctttatcatttctctctcacctgaacatctatctgctccaggaggcctgagtgtccacctcactcactgctgtatccccagggtctagcccggggcagcaaacaataggtgctcagcaaactacttgctgatcagcggaagaaagcctcttcccatgtgtcagagtggctcatgcccatgccgccttgctgctgggctctgagctctcggcgacaagtgctgccctgtggtgcttgccaagaagagcctcacccacaactccggtgaggaaaccagtaacgcaaagccttggactcaggtcctcctctgtgctgtgggacagtgctcctcacagggtgggcgctagctggctggatgtgggaatggatagttagcacctggcacagtgtcaggcacagagtaggtcttcatcccctgaacgaagactcgatgcagggagagggggcggcagtcactagcagagatgggaaccgaggagagggaggtgaggctggcagggctgaggcaatggtgaggcccacgggtgaaaggggaaagcagccataagggaatttatgtgtgctccaggcagtgcccagagccagagaagtggcggctctgctctgctctgcccaggacctcctgcccatcccaaactcagctctgggctcttcccggagatagacagcacgagccagggtgtgtccagaaggcgtgggtggggaggaggctggtgaccccttcctcagcctcagggagtcctggtctctgcaggctgtccagagctggggagcagatgggttgtgaggctcagaggacagggccaggccacttcagtgtgtgggtgggtggcagcgagcaccgcaggaaggatggtgccagttccaagtgggaacaaatgtcctcgcgtcagagctgcctaggcatggcccaggctgggaggtggtgagcactctgtcccaagaggaacgcccactggccctcctgcagaggggcatcagatggctaattgtccaggaagctccctggaagctctcaaaggctggctgccagctgagctgttcacggccctcctgcccagatgcagccacggtgggaaggcagaggggggcagggccagggcagccaaggccaccccactccttatcaaccagcaccctgggccccatgtgttccaagtgagctgccctggcccacgaagaggctcaaacgccccattggctctcaaggcacaaaacgatctttctttttcaatataatgccagatgcaaaagtgatcttcctgcctgacctgagaggggctgtggatttatcagggcactgccctgtacccagagcaaggcctttgtctgccaggggcccagaggtgagtgcccagagaaaggccagccagggaagacgcagggaggggaggggcggggagctggttaaagggtctcatccaccctccagaactactgtatccccacacgcatctcacaggcggggaaacaggggctcagggaggctgcctgttatacaaacagccaatgcctcagcagcacctactgcagctgggggaagcttacaggcattgtctcatggaagcttcagaacgtctctaagagtcacgtccacggtaggaaggggctgagcccagttttgaactcaggtcagcctgatttctgagcctgtgtgcttcccacttcatcacgttatccccctaagcccccacgctgagactcagaggacaaggagggggtgccacagccatgcaccctgctggatgccaagccaacagaacccagtgatgacctgccaagaagcccgcccagctggcatggctcccccccaactctacaggcgaggaaacaagcccagagaggtttagcaacttgcccgagggctgcacatctcacaacctaccgttgtgggctctaaaccctggggtgcccagctcccaagctgttctgtccaggatacagcctgcagccaggatcgtccctctcagagtcctcgggccaaagttccagagacccttctcccggctccttgactgcggtcgccaaacccctgggcagagggccagggctggcaggcgcacagctgctccacacacacctctcgcttttccagatgtgaatgggacccagccaggggcaacaggctcactcggaggggaatctgaagacgcaagtggaaaactatgcgctgtccgatcgcaaccctccaatctgtccctgtggccgccggcagctccgccttgggccacagacctgctgactcagggcttccctggcagccgagggggctgggatccgcagagggcctgctcctggctggctggctggttggggcgtggccttagtcctttcaggggctctcaacagaatggggtaggggtcgggagggcagagtgcttctcttggagcccaaggcccatcctccccagttaaccacaggggcgcctggcagttatgggtgctaagagtgggtttgggacaaacccagtgccaattatggtgcccacacccaccccaccactctcctctcattggtggtgaggaggccacccgccagtgctcgtgacacccctgtgaagctacctgtctatcaccacttgacagccacaaagcctcccgtaaggccccgccccacagccccgtcaggtggccgtgccattcaatgaggagactgaggcacagagaggccagtctgccaggctctgtgaggcggtgctgcttctcctacagaccatgtgggcaaacggcagccaagagggagcgagcgaatcacccttggacagggcacagcgggcctcccagtgccgagccctctgcattctgtcaacaagccctgaggtttccaaagtgccaatacctggaaaccttgggacagaaggggactcaggaaaatccagctgtggtcacaaggaaaagcacacggagagctcaccaaagtccaggactcacccgctgcctggcccagctcccaagtcacccacccaggaggtctatcccggggtctggggcaggggcaggggcaggggcaggcagccgctgactcactccagggctgagctctgcctctctcctttcccacagccagccggcatcctcatcccaagagaacactttagccctcactgtctgccctgctccctcaaacctgcccaggcccaagacccgccattgaggctgaggcccagggccccaggcactctcacccagcagcagagacaactatggccactgtaattatggtttcttattacagtgagagtaaactgtgtggctgggtttcccctttccctttggctgccaggaaacttggcaatttttaccccaacagaagaacctcaggaccctgtatatctctgttctgttctatttttctaccctagctcatgacatcctattctaaattgtgctttttccactcctgattcttttttttagagatgaggtcttactgtgttgctcaggctggagtgcagtggctattcacaggcatgatcatcacacactacccttgaactgggctcaagcattcctcctgcctcagccttccgagtagctgggactagagacatgcaccaccatgcctggcttctgatgttttttattaactattttgttgcaggtattttctgtaagctgtcacaagtattttgggaaggaaggaagaaaggaaagaaacaaggaaagaaggagaaatagaaggaaggcaaaaaggaaggaaggaaggaatgcttataaagtttatacaccagagagtgagggcagaaagaaagagggacaatctttcaatcccttacctgttgcaaatccacccctttaaataaaataatatgcccttaggcggcatccaagtacaaacacatcttccaaataggtggctgcccctaagcccttccatatacaaattcgggccccgtgtagttcccctttacagatggggagaccccagccttgcctgagatcacaagggacctggcttcctgcgccctggtctccctccttctggcagctgcagaggccgcagcgatcacagatggtgtcccctccccagggggccaaggagctctgctccaccctttcattctcaccatgcaggcgccattccagatacccccaccaccccccacagctgtccagctggggagaaagctcaacggcaagggtcatcgtatccaacactgactgaatgctggcaccgcaccgggccctgatcttagtgtgtattacctcactgaatcctcaaaacaatcctaaaaggatctgcagatgggaaactttggctagaggtgaagccgcttcacaccactaacaatgccaaagccagcattaaacctgggcagcctggtgtctgagtccgggctgagccctcagccactcagtgactgacgtttacggtcacacgaaggaatcactacaccaagcgctgaagggacgcgtgtgagccccatttcgctggtgggtaacaggctcagagatgctgtggggcagggccagggtcacacagctgtgccctgtgccagcatgttatgtaacacatgctgcacctgcccctggcgttcctttcctgaacgtgtgctctggatcccagccgaacgtgtgctctggatcccagccaatcgcagcacaccccctggtcattgttccactctcctcctcccgctccaccagagactgaaagttgctccagctccctccatcccagctccttcctggaccctgtacagccatgcaaaccatccggcccaacagtcgacagccaggcagagcagccatgcacgcgtcccggtacctgagtgtcctcacagagatgcagtacttccacataaggctccacacggcactgccataccccttcatgcctggctcggtggaggagcgagtggccaaggggcccaccaccactgccccaccacccagagtctcctcctggccagggaacggctctcttcacggattttcaggtcccttccttcttcatggtaggaagaagaaagaaaagcccccaaagttagggaaaagaggaggcactggctgccacaggccactgcagggctgagccacaggccccactatccaccggccagcctctgtgccctggtcctgtctagctgctccagaccctcctggccaagcggccctcacacactagaccctgtggcttctgcacaaccttgcgcctgcctcctgccaggagacagcagtggctgcaggccaggggagcagtgagtcactcagggcgggatgggtgaggggcgtccgccggtgaggaaaagctcagctgccggagcccaggggctggccctgcgtccagaggctggcctgggatgggagaggcgagctcagagagagggaggcgggcggggaggcgagggcgggcccacatcctccccatttccccagaggcttaaacccaactcccgccctgcagcccaaagcctgcagcccggcccaccgaccagctggccaagatgagggtggaggaaggggctgctctgccacctcactcctagagaaagcctggggttgacacaaagcaaaataaagacaaaatcagggctgctcctctggacagtggttggccctccaagggtctccagctggtgagtgagacggtttccagctctggctgggccacttctttgctgtttgatgctgggcgtggtcagccccctccggccttagtttcacctcaggctactgtgggcttgtggagctctgggaattggcctaagccctcctcaggccaagaactaactcatccagttctcccaatgcccttagaaagtggattttatgattagtgttggtttacatgagacacagatagaggaagtcacttaccctaggtcacagacctaggaattggtggaggtgggatttgaaccttggcagtctggctctaagagcccacgctggagtcagggtgtaagctggctcctctctgtagggatggagtggggtgggatgaagggctggagcctctgagcagctgaaggccttggggtctgggcccaggctgggtctggggcatttccagactgaggccccagcttgagcccccaccctggtctccaccagctgctcccaggcccagcccaggccaggcagctggggcttcccaggcagggcccccagggataatgactcacggatcaaggtcaacactcacagatctacttttccccacctacagcccccaggaagtcccccagaagggcaggtgcacccagcacctggcacccagcagggccctgggcatcatgtatagtgggcagcagagcttccatttcaccgggggaaactgaggctcagagagggccatcacctgtctgcagaaacagggagggtggggccagggctccaaagccttgctctgtccccaggccccacccccggcctgtgcagaatgggaaatctgtctcagattccagcctgattcccacatcaaggattagcagctgcaggcttctccatcccctgagccaggaaagaacttttaatccaaaaacaagataggtttctacaaaggctgtggcctccctgggggactcggaaacccaaattcttctccctgtcatcagaggaggcttcacaagccaccacagcagacctccacctgccacaggggctcctccacagcatgcagcgggagtggctgcccagcctcttcttgaacacccccaatgatgtgaagctcactacctttcaaggctccccattccttgttttttctttaagcttccccattccatcatggaaccccactgacctaaggaaactctcccttggacattacttccctgtcacttttcatactggcctcggttccttgtgccacacagactaaggcctccattcaaatgtttatctggcctgtcctcctagtaggggaagttttcacaatgtcttttgtgggtggaagtagcctctgcttacccgctttatctctacccactgattcatatattcacacatccacacaccttcctctccaatgaatcatccatggattcattaatccattcacatatccatctatcatcttccttcctatcatccattcatttatcccctcatccacccatccatccatctgttccctcacccgcacatacacccatccatcactccatccatccatccatccatccatccatccatccatccatccatccacccatttatccacccacccatccactcatccacccatctgtccatccatccacccatccatccatctgtccatccattcacccatccacatatcatacgttgtctgcatatcattgtaaatttgaattcattgcaaatgagccttaattcatccatccatccacccatccacccacccatccatccatccacccatctgtccatcatccatccacccatccgtccatcatccatccacccatccgtccatccatccacccatctatccatccatctaccccatctgtccatccacccacccatccacccatctgtccatccatttgtccatccacccatccatccactcatcggggacatgtcacactctatctgtctttgccatcctcgggggctcatccttgagaacagggcactccttactcatctttgactcctttgtccctacacaagctacttcctcttgcagagcctcagtttgtccctttgcaaaacaggaataaaaaatctctgccctccaggctgtgatgaggaatgagtgataccacaactgtgtgaccctgggtataagacttaacctctcaacatcactgtctgcaggacagcatggccagttcttgaagtgagagttcataatggtttctgaaacagagagtgcactcagtaaataccagctgtcacctaaaaagcccctggcactgccgggcacgtgttaggtgctcagtgctagttgccctgtaggacacaaggagccccagaaagagtgggggaagcgagggcaggtctgcgtggaagccttcaccccctcagccattccatctccccagccacaaggccaaagccgggctctgcagagaactggctcgccctccaacctcagtccagtgactcacacagcccgctggggatgaagtcactgccgcccaggcaaagggaaggacacatttgttccctgggagatgctgatgccattgtgaacttggcctttgagggcagggcacagctcagggactgtgtgcacttgaggaaggcagcaggcacagtggagggacagtgttgaaggggaccctgcttggggaaatgaggactggaaggggtgccccctactctggaagcttagtgagggtcagtgagcctctgtctggcctctaggccttgctgaatgtgtgccctctcctcgcctgttgagatgtgtctgcctgtggtcttagggccttgagaccctctaatttctgcctctggcttaaggggcaagccactgttccacatctctcatccacaaaatgggcacactatactcgactcccgcctggggaactgcaggtgacagtatgagacctctccttactcactgggggtccgtgcagcctctcctattccacccactctcccatgctgaccgtcacccacaggagaccagggtggggtgggcaaggccctttgccatcttctctctgcattgagcttcctgacacccccaagtggcccccactccatcacaacacccctgagccctcccagatctccaggcctgtccaccctgggccaggaattctgcacatattgcccagttattctccacatgccccagtctgctctgggcccgggactgcagctcccaggctcccactgcctcctggttcctgacggggtggccagcagcggccctggcaggaggtcaggaggtggaggagagaatgataggtcagggtactcgttgcctcagctctgtcctcgcttcctgtgcccctcggcagccacagtcctgatgggtggctgtttgcacccaggtctctctctttctggttcatgaaactgttctctcccccaaccctctggcccagggctggttagggttccccccttctgccagcccaggtgtccagttcccttaaccccatcccaccctgcacacagccccatcacgggccacactgcaagggagcttgtgtagtgacccatgtttcctaccaggacccaatgctcaaggctcaaactcagacgacacctcctctaggaagccaattttccattggcttgttccttcacccagtcaacattcattaattggcttactctgtgccagatatcacttgaggatttggtgaacaaaactgtggagcctggtggggctggccttccttctgtaccaagggagcaaatgaaaacgatttcccacagtgggctgtgccatgaagaaggcgtataaactagatcatttctctggatgatacacttcccttctccaggagtccatccttttttgccctgcatcctctccgttccctgagcctggactgcagccatttcttccctgcacttggatgacctgtctctgcatccctccctcactgctctgagagctcacatgagcaggtgaggagatctatgtagcttagttctttgcacaatcaccctatgaagtagcagttattatctccccagttttttttttttttgtttgtttttttttttaccaattaataaactgaggttcagatgctgaggttagttactcaggatgatatataaacccagctctgcctatctgactctaaagctaaagctctggaggctgaaaacaaaataaatcacttgtcatttatatctgcagtcttccaatggtgcccagagccatgcaaggcgcaggaaggcacatacaccgagttggccgaacttcaaaaccctggatcccccttctcaagaagcattggccttttgaggatgggtgctggaatgcccgttttccaaatggaaaaatgaaagtccagggtgctgagagcgttgggtcttggaggacagtagtgggctcccagcctcccaggcagctggcatcctgagttccaccatcttgtctcgggcctaggatggccactaatatccagtgcgcaggcaggggctgggcactcacttcagggcaggagctgggaaagaaggcagagaagagcttccgcaagtccatcttatggagcacaaagggccagcgtccaagttgccagacttggcctgcagggcctcactttacttgctgtgcagaaaagagaccgcaagggggcaatggccaggcaggggccagggaggaactgttgcttggactggggtggtggacaggaaggtgaggacaagaggttggattctagagacattctcaaagtggaactggtagaaatgtctgatcaataagatgaggaggtgagagagaaaagaggagtggaagatgatgcctgggttgctggcctgaacaactggaaaaatggaggttccatccacggtgacagggacacagggatggccagtgggagcaggtttggagggatgatgaggcaaggcagaacggggggactccgactggtcaaacagaacaactgtggcttggctctggctgatggctgctctgtaggaataagggctctgatttttcagatatcagaaatccaggtttttacgtaacagctcttgatttttatatgtttgcaataaattcaaatttacaatgatatgtaggttaatcctatgcaagccaaataaaatacatctgtgagtgtctagcccacaggatacctcttgtatcctccgctccttcttgtctttcaaggtccacttagctgcctcctcccccaggaagctgcccatgattgcttcagctccagagacgcctgtggcccctcaaagccccgcagggctgataatcccagactggaagtgacaggaggacaaatagggggtttgcttatccatttctcacgcctcaagcatagggtttggcccagagggggagttaatgaatgaatacctgccgaatgaatgaatgaacaagtagctcacttgatccctctgcccttattttgcaaataaaactgagtcccagataagggacatgacctgccagggtgggatctggggccagggactgctcaccgtctggcctctgtttgtcagctgtcccccgaggctgggccaggctaggccggcaggaagtataaagacaattgcacagtcttatcgagttatgccatgggagggtagaaacaggatcctgagcagctcttgagcatctgggtagaggctgtttgggggatgtttttccaagaacttgctaaggtgaccccaaccggggtcagggcagagccagaccctagaactgggtgcctctgcaggtggcatggtcatgggacagatgacaccccagatggaaggactcacattagcaatcagtcaaagtgacagccagtccccatgggttgtcccttctgagggttctgacacgtttcctttcagccatggggagggcagatggtactgggtttgaccatcagggtttgtgctcagatcttctatgcaaggaaatcagacaacataggcaccggaggctctggcctcattcttcagtgttggagatggagaatggagtctcagaggtggaggcgacttgccctgaggtcacacagtaaggaagccgcagatctgggactccggatcagaagtcctgattctgagacctgcgctggccaagggatcctcacaagccgttcctcacaccttctggcctacctcagtttcttcatccacaacatggggagaaaaataggatctatctccaggggttgtgaagatgaaacaaatggaaggagctaacgctgtgtgactgtactgtgtaaagctatatagaagatcacgaatatatagcaactgcccttctaagcctctagccttgaaagtttctggctatggccgtctttaaaacttccagggtgacacagctctccatcaacacaacaagaacggtgatacctaagggctactgaatggttcctgtagccactgctctatgtgtgactaattcatttaatgcttaggctcatcccatgaggtaggtgctattactatctgatctataggataaagaaaggaaggcagagagaggtccacagacacgcccagggttaatacagatagaacatggcagggtggggaattgaactgaagcagctttgttctgagacatgcttcataaccgctacataacacggctctcctcggctggcttggaagtctttctcaatgtctaacctaaatcctttttgttgcaggctgtgcctattcactacccccttccttagacaaagaagaaagctgctcccttcaatctccattttgttgtgctgagaggcctcaattctttagcccctgtatcctgactccctgggtcttgccgtccaggtcaaggggggccaaacaggaaccctccccttgtgcgtgagcgtgagtgtgtgtgcgcacatgcggtgtgagatgtgtgtgtgcgtgcatgcgtgcacgtgtccacacaaatccccttcaaagaggactggtgaggactggtaaggactgcagcaccctgggctgggtcctcacctcctcactggcctccctgcctcctttccttgtcatctgctgcctctgggctgtttcccaatacccagacctgtagaggtaagtctgctgcctgaacctgctccatggctttcctccattcccagaccattcccagctccaccctcgtcccacctttatttatttatttattttgagatgaggtctcgctacattaaccagactggtcttgaactcctggcctcaagtaatcttcccatctcagcttccggaagtgttaggattacaggcgtgagccatcatgctctgtctaaaatcttttttttatacagtctaactctgtcacccaagttggagtgcagtggtgcaatctctgctcactgcaacctccacctgccaggttcaagcgattctcatgcctcagcctcctgagtagctgggattacgggcatgcaccaccacacgtagctatttttgtatttttaatagagatggagttttgccatatccgccaggctggtctcgaactcctcctggtctcaagtgatcctcctgccttggcctcccaaagtacctggattataggcatgagccaccacgctcagcttcgccccacctttatggtgcactctctttatgggccattctagttatttattaaatattttcttttaaaatcaactggcttaaaaaattggacctgagtctaatcaagcttcctgatctaactcccagttaacaggaactacaggtgacagaggaatagcttaaatgacatcatgaggcaatcagcctaatcctgaatgtgggacatgccacaggcaaatggccctgttccttcaatgagtactgcaaggatgaaaaaggaaggggagcctctaggtaaaaggatgcttacgagacacgtgcactgtgtgggtcttgttagggccctgatttgaacaaaccagctgtaaaaagacatttttggagaccctttgggagagctgaacatgaaaaacagcatggagtgggtggaagaaactcaagcatgaggcgcaaagctgtgccacgcaggcgtgggattcgccttacaactccgaggttcaccttcaccaagcagctatctccacttccacgcatgtttcacactttcaacaataagaagctaaaagcaatgcacaaaataatacgttggttggatttcagccctgaatacatttattttaaaaggaaactttatatcactcctttaaatggaaaactaggatcatctgctgtaagtagaaggttaccatgaaaacaagacaatgttaccgagtttcacacagatactgtttcctgccaaagatgctgggcttaaaaactgccccgtttttgttacaaagaagcccagggacagaagtgaactcactcttacctggacccacctttctgggagcactggcctacaggtaagggccacacagcacattctctctgccacatacttctcctctatcagggaatggtggtgacaagcctgggggcagggacaggtccaccccagctggtagacaagggcccctgcctgcccctgcctacagcagggaggggctcagctgggggactcggcctctgcagaaccttggggctttctgcaacatggaatccaaaagctatagggctgggtacagatgaggaaaccgaggtccacagtggggcaagacagtgtcccaggtctcccggcaagcccatgggggataatcagaaaggacaagactccaggttttctgacctttagaacggtgatcatctaacctttccctcgttcacagatattgcttgagaacctactgtgtgccaggcacagggggcagaggggcaggagtgaccaagacagagtctcatggagccgacatttgcagacaggggatgcaggacaaaaacgctaagcaaattaatgagataatttcccaggacggtgagggcgacaaagaaaacaaaactgagtgactgtgaaaggtgaggagagggcggtgctacactagacaaggtgacagggagggcctctttaaggaggagacaatggggctgacacctgaaggactaagaaggcggtggaggaggtctagggtagagaacttcatgagcccctgcagccagccctcagcaacctctggctctgtttttaaaactttagatactgagttaattgcggacccacagaaaagttgtgggaagagcacaaagaacccctgtatagccttcacccaggctccccacttgttaccattgtatcccatttgcttcctcatattctcctttctctacgcacacacacctgtgctcgcatacacactttccccctgtaattgtttgagagtaaggtgcccacctcaagccccctactccttcaaagtgtctttcctaaagacaagaacgttttctggcataatcacggttccactttcaaaatgagggcactgacactgactcggtactactctccaatcctcacagctcatccagagctgccaactgacctcatgcggtcctctatggagacacaacccctgattcctgagcctttcacacacaccccggctggccctgtgaaagtggacagcgcagggcggcacggggaaggctgtgctgccgtgacttccgcaggccgaacctgcaggatgcggatgggccagcccagggccagcaactgcactgcacggagccaggttggatcctgacacggaaggacaagtgtgcacccctaaaacaccaaaatagccccccatattttgaaccaagtagaaaaaactaataaagctttaaacattttttttttttttttgagatggagtctcgctctgtcgcccaggctggagtgcagtggcgcaatcttggctcactgcaagctccacctcgcaggttcacgccattctcctgcctcagcctcccgagtagctgggactacaggcgcccgccaccacacccagctaatttttttgtatttttaatagagacggggtttcaccgtgttagccaggatggtctcaatctcctgacctcgtgatccgcctgcctcggcctcccaaagtgctgggattacaggccttaaaaatattttttaaaacattatatataaagccccacattggtcgatctgttcacatgtccccgtcaaccctcataaagcagctctgcagggcacacgagggcctcggggcctggaaactgcagtgcctttggaaatgacctctcgctttacaatactcacgtggtgttgcaagacaaacaacagcctgtgtttattttaaaattcaatattttgtttacttgattattgagtttttggcaccccttaaattctgtgctcgaggtgaacacctcacttgtctcaccctaatcccagccctgaccaccaaacaccaggcacataagctcttctgagggcacagaatacacgcccagacagcgtctcctgacgagcccgaggacaggtcctcgtacccacttcacagatcaagacagagaggccctgtattgatttgcagaggcttccgtaacaaaacaccacagaccaagaggcttaaacaacagaaatgagtttcctcacagttctggaggctggaagtcagagcgaggcgcatttctcctgaggcctctcttcttggcttgtatgtggctgtgttctccctgtgtcttcacacggcatattagtcaggggtctccagagaaacagagccaataggagatgcatatatatgtatatgtatatatatacatatattttttaaaataaggaattggctcgtatgattacaaagactgacacgtctcaagatctatagtcagcaagagacccaggagagctgatgacttagtttcagtctaaatgccagcaggcttgagacccaagaagagtccgtgtttcaatctgagtctgaaggcaggaaaataccaacgtcccagcctgtgggcaccaggcaggagaccctcttactgattactgagcttctgttcaattcaggcctttaactgattggaagaggaccacccagcctggggagggcagtcggcttcactcagcccagtgcaattgttcatttcatccagaaacaccccacagacacacccagagtaatgtgtgaccagacatccggtcaccttatggcctaggcaaggtgacacatgagatgaacacggtgttcccgctgttggtggcccaatttccttttcttataagggtgccagtcagactgcattagggcccaccctaatccccacatttcaccttcattcctctttaaagaccttatttccaaatacagtcccatttggaggtactggggttacgacgtcagcatgtgaattcagggagacacttttcagcctgtgacaggccctgccaggcgaagggctcagcttgcaaccactcaggcccaggcgtctccccccagagtcaactgggcaagtggagctcctcaggttgccatgatcttccccctccggaaggaaggacctgtccaagccggtggctgccaagaaaccgctgaggtgcaaacagtcacttgggatggacttatctcacgtgctaaatccagcagttaccaagagcaagaagtgtttgtggtgagaagctcgtaaggtcttgacccagcgagaacgtttccccgaatcaaatctccatgaacctaacacccgtttcccgcctcttgccaccagtgggatcttgctaacacagaaggcagccggggaggaggagagggcgtagtgaaagactgagccagtgtggagcctgttggcacctgcaacgcttactttaaatgctctctggacgggctcagtgaggatctgctgactgaggccaggcagcccgtgactcgcactaggagatcagctgctctctctaaaccagccggattcagctctggatgcttgattctcattccttcactgcaactattctgctgaggacaagtttctcaaggccctgccagtttggtcaacctgaccctctggggtatttctcacctgcaccggctcctgaatctcaccagcccaacagaagtgtctgagctaatgctcgccatcgcagggaatacaggcccacatgcagctcctgtccagcacacaggctcccctaacagtattcccatgctcccagggatcggcctcgccccgacagggcacagtgctggtggggtgggaattcagaagcctgtgccccatggaagcccagtggtccctggaggctctgtcctgctttctcctcctccactgacatcccagcactgccaaggggcaggacaggacctgaacttggccagtgaaactctcctgagacttgacagcttgagtggtggcacagggccatgggctcccagggagcctttttcacagctgtgagcctgcccttgggggtacagagtaggcgccccggctcctaatccacatccagcttcctgctggtcccctgacctcctaagagtggctcagtaaactccctttttgctgtagttggcctgtggcgatttctgttgccctccaccaaagactccatcagacactaggcaccatctgcacatccttctcaggactcttctgccaaggacactgtcttccctacgtggacttgagaagtcctcctcagccctcaagacccatctcagctctaaaactctaagaatcctctcctgctcccccagctgaaatgattgccccctctcttgaataatcaccacacttcatttcaacttactccattaagaaaaagaaaacctgccactgattgaatgccactgggtcccaagtgtccctacacctgttaggtcctcttcccaaccccaggatgctgagggttagagcggagaagtgatttgctattgtggtagattctatttccaaacagggccacaacctcatctcctgtcccaaacgctctgccagaaccctgccactcctgagcaggggtagagtttaagtccttcaccatgggcttgggcagcacttttgtgactgtcctggtgaagatcatgccatagaagcgatgctgtgtgtcttctgaggcctggtcataaaaggtggccatttctacttggctctctttcccttggattgcttgcccttgggacccagccgccatgttttgaggacgcccaggccacatggagagtcccgtgcaggtgttttggctgccagccctggctaaggtctcagctgtcagccagtagcatttgcaaggtgaggaagggagtgagtggctgggtgggtgcgtgggcaggtgaggcttcctaggaatccagctcctagtcttcaaagcccagctgacattgagtagagcaggctctgcccaagttgcagttctatgggattttaaaccactaagttttggggtgatgtgttacaccgtcataacaaccgcgacagttacatgcagtcagaaagtattcattagtgtggaggagacacgagatagtgtagctcagtggaggtggtcacctggattgataaactgcactccatttctgtgactttaggctggtcatttaacctctctgccttcagtttttccttgtctgaaacatggaaaaaataatagtatccctttcacaaggctgttgtgaggattaacagagataccacatgcaaagccacttagcacatataaacactcaaagaaagtaataataataaacaaaaataattttttttaaaaagaaaattatgaaaggagccagtcagattgcattcccacttcgcctgacttcagaactgcactgtcccctcaagccacaaagccacccagggtgccccctgtagagccactcctccctggactgaacttccctggccaacagatgaggcccagggcatcagcggtgtggggggtgcccgacagccctggatgagcccaggaagctcggccagcttctcaggctgtgtgcttggaatcccgtccactgagctcccttactgagctggcagtttggggagcttgtcccaaagtgagttccttgatgctgtgttttagagatccctggcggcctctgttctttctaacagaagcaatctgtgaaacctgcgcatcaggagatcagttggcaccttgtgtgatcagaactagtcccacatcctgaaccagacaacggcatccacggcatgctgaaggtgaggttgcaaagtcagcgtgtgggcagagttcctaccacccttggaagcctcttactgtggagggcctggaactacacagaccaagggaacagcacatgtgtgcctcaccctccaccccaggatgcctggggctgcgtcaagctacagttgtgcccccacaccatttacatgctctcctctctgaatctctctttctctcctctttacattaaaaaaaccacctggctttcaatattgagtgtagaaagaatgtggggacatgggactctcacccactgctggtaaggctacatactgccagggccactttggaaagcaagttcactaagcccaggaaagttgaagacactcatgtgccatcctggtacaaaccctccataaatgcccgcagccaagcacaaggaggcaggggcaagggtgcttactgcatccctgtctgtaatgtcgaaaaatgggacatcaccaaaatacacaagaacaggagagcagatacttagaccggggcatggctataccatgaaatactatacaccagtgaaaatgaatcgatgagatctatacattgcaatatggatgaatcttaccaataaaatgttgactgaaaaaacaaggtgcaccttgaagagatatctgcacacccatgttcatagcagcactacacacaatagtgaacaggtgggaacaacacaagcgtccattcgtggatgaaaggataagcaaaacgtggtccatacttatagtggagtatgattcagccttaaaaggaaggacattctgactcatgctacaacatggatgaaccttgaggccactctgctaagtgaaataataaaataacaaaaaaacaaatactgtattgattccattcatatgaggtccccagagcagtgaaattcatggagaaagaaagtagaatggtggctgctgggggtgaagggaggggggagttagtgtttaacgggtacagagtttgggaggataaaaaagttctggagatggacggtgggaatgattgcacaataacgtgaatgtacttaatgccactgaattgtacaatggttaagatggtggattttaattctatgtgtattttaccacaagtaaaacttttaaaaaagcaacttgcaatttataatactatgatctaaagtttaaaaacatgtaaaaccatcttttgttttagcaacgctgtaaaaatatgcatggcaacagatgaatggataaagaaaacttggtatatatatgaatatatatataagtatatataagtatgtataaaaatatatagaaatatataaggatatataaatatacaagtatatatatgtgtgtgtgtgtgtatatatatatatatatatatatatatatatatataaaatgaagtactattcagccataaatgatatccagccatttgcaaccacatggatggaactggaggtcatgatgttaagtgaaataagccaggtacagaaaaacaaaatatcacatgttctcacttatttgtgggatctaaaaatcaaaacaattaaacttatggacatagagactaggacagttatcagaattgggaagggtagtcgggggacagagggggaggtaggtatggttaatgaatacaaaaaatagaaggaatgagtaagtgaataagacttactatttgatagcacaatagggtgactatagccaataataactgatttgtacgtcttaaaaataattgaaagagtataattggattatttgtaactcgaaggataaatgcttgaggggatggataccctcaatgtcgggggaaagaatgtagggacacaggactctcacccactgctggtaaggctacatactgccagggccactttggaaagcaagctcactaagccatgaattctccatgaagtgtgtatttcacattgcgtgcctgtgtcaaaacatctcacgtaccccataaatatatacacttactatgtacctacagcaatttaaaaaaatgtgcatgggaaatctacacaccaaacaagagggactgtttaggcttagctctggggaagcaggaaagggataagatttgtggggtggcccacaggggcagtccaccacaccattaacagcttattttggaagctgggcgatgggtatactactctcctccatattttcttcccacctgaactatttcattaaccaaagtaccctgaggtcggctgggctctgggaacttgggagagggcttgccgcctcccacaatggcctttgggccagagctaaagagtctatagaggcatctccccacaaccaaggcagaacgcagaggcgccccgtgaagatttctttccgtttgctagttgaaataagcggctctgctccttcccctgcccgagcctctggcagagctccaggattattttacattaacttaagatcactaatgaagaataattaacagctttgagggagcctggcacaccctgtgtttagaagtggttaattatgcattgtctgcaaaacacccctttcatactcttaagtttgggatcgccgttttaaacaacggaatatggcatcaggcaaaaagccaagtggctccatttgcagagctttcctggggaaggatccgtttgggtgaggacagccgcttgcaaagcctctactaagtgctgtatattcagtgcttttccagcatttacccttgaaatccccacacaagggccatgagaggtgagctgagcatccccctttccccatgttacacagctgtggaggaaaagtgacttttctaagctccctgccacagcgaggtctgaccacaaagtctgagttcttgcccacctggctgatgcattatcattatttctggtcgacaactgctggaaagatgactgcccccagccctcagcatgtcatttgccagggtggacagaccgagctgctcagctggcagcatgcagcctccacagctggatcccctggttaaatcccagtggcaccaccgactggccatgagcccttggacaagctacttctccccgtgctttggtttcttcacctggaaaatggaagaatcatgactccacttcgtggcattagcgcgcagagttggtgctcagaatgaagcctcacatgtagcagacactcactgagcttccctgccccaccttcctttctagctcttcccctgacacacacctaggcttcagcctcacctctgatcatttatgcaccatgtgaggcttggtcccacaccatacgtttgttcgtgctttgttttccacccacagtgcccttccctgtctggaaaattccaactcccatgtctaggcccggatcagatgccacctcctgcaggaagccttccaataagacctccctcaggctgctggtaatttgtgcaccctctgtttataccccattcttaacattcatgagttgttaataggtcttttccctttgtaggttgggagttcctcaaggattagtctcatttgtctttcaggcacagtcagggcttaagaacaagagcacaggctctgagtaagaacctccataggtcaggggaggggacaaagagcgctctcacgggttcctcctagagcctgagccacgcctctcacacttggaccacgtggcccccagagtgtgactctcagtttgccacttgcccactaagatccttcatgggctccccactgaatgcaggacaaggcccaggctccggtcctgagccccagcccctggtaccccttcccagctccatggccttttgccatgacccaaagacacccttcccttttaaagcctctgggtttttcccatgtggtttcccctctgtctggaacacctgtgctccccatctcaacccagcaaactcctccagacactttaccacctggctcagctgtcacctcctccatgaagcccccgcacccagccctgctcctctttcaagactctgaccgcgactcatgcctggctagctgagccctgtggagcagggtctgtccctcatttgtccctgcctggcccaggactccggcgtctgcatggactgagactgtagacattcaagagagattgcatctcgagacaggaaagacaggggtcagatctcgtggccactcttctgcagttgcctgccctctggttttattctgctcacctgcgcacaggggctttaatgcttcttttgcaggagggatgaggatgaacaattaagtatataaagtgccccaccgcggtagacaccgaatcactgacagccggacatgccctcctgaggccgcatgaacaagcctgggggcggggggtggggtgaaaggctgcaccacagcgctcagggcccactgggtgtcgggctcctctctgatgtggcttgcactaatcagacgcaggacaggcctctctcgctggcaccctcccaagagcagggacttcctttctacagctgccgtgagaccctccgtgcccgccccctttggagaaagcccactggaaggaagaagaaaagctcccacactttcccagaattgctcgtatgctaatggccgcagacttcacagagtgtgaaatcaggaaaaactaattccctcagaatagacgggacaattccctcctccaggtctttaataacacgccgttcaaggtgaccatggcgacggctccatgatgatctcctgctggcccggatgtggttctttcttgaccaaggtgtgcactggacagaacacacacgctcggaagaacctgccggaggtatgaacattcgggcttgtggtgcctgcagcccctgtcacctcagggagcagtccccaaatccatgtcatcaaatccgaatccctacagttgggaaacaggcttaaagagggaaagtgactcgcccaagatcgcgcagccaggaaagggactgaacttcgggctcctgatctcctgaccaggggacccccaactctgcctccccaaacttgtgcttagggaggaggcaggccaacccttgagtcatccagcccacgaggtcggagcaagtgtaccgggaaagagcaggccggggaccccgggccggtgcagcttccctgcctagggctcaccccggcagcaaggaacaatgaaacacagtgcctggccacagagcagtccagggtgactctttctctgcagaaactctaccagtttcaggccagagggagaggaaagaatagttaagcccagttgcaaagtgaaccacgacaaacgctgctgctggtcttggccagtgacggggaccctccgccaagaggaggaagccctgcaatcgggcaggatcagggcgaactttctctccaggtcccattgccctagtggccaaggctctccccagagggtcgacttaccttttgtaggctccatgcaggggctgtaggcacaggaactgccagtaatccaggcaaaaggccttgaacttgagcattttcaccttttggtctccagctggaccacggtaacgtctccgcggagacacggagaggggctagtgggaggtggagaaccggctgcttcggcccgccctggtccctgccacggcggcccccactcacatggcccagcccgcccggcgcagcttgtacagtacacgcctccaatacaaagagcagccagcacaaaagcctagcaactcattcacgcagctcgcctggcccggctcatgctgctgctgtctctgttagctggtgcctccgagggcttccctgggggtccctgggacacaccaaggcagctctggctgtatcaagttgtgggggcccccagtccatcatcctggggggtctggatgctagggctcctgacggtggctctgcaagtctgttcttccaaccaggccctggggctccgggtggtggggccggcactggctggacagtcctacacccgcctggctggcccagagtggctgaggccaggaagacccagggagagcaggtagggagggggccagatgacaggcaaacactggcctcttttgccagataaattacgtttggcggaatccctgttcggcctgtgcgagggaaaactcaccatgtagccacatggtgcttggggtgggggcagctgggctctgaaaggcaggcgaaggaagactgacagggtcgcccagcgcctgccgttgcctgggcgacggggacacattgataaaatctaaaatggaaccgctatgacagccgctcattggctgccggcaggggaatcctgtcgctaaccagggaggggagcggctgagctgcagggccacagacaaccaggcgcattgttgggcagagggaccccaggcagaatgggtggccccacaggccaggggacctggcagtcacagacaataggaaaggagtccctggcccaccctcacctctccccttgtatctcctgggatctggctggtcccggcgtctgctccaaccctcccatggcccatttcccacacactagccacctgaaagtctgaggctctgggtcccagatacagtagccaccctcacccccatgaatccggcacaccctttggttccatgcagtctgctctcgggtgcacttcctgcagctccgctcctcctcgtcagtcaggtcccactccagcacccctcgtgtctaagctatagcagctcagcccccttcagccactaccctgtctgattctttccatgggacatcccatcctctgaaaggatcctgcttttgcatgtttacttgttaactgtctttctcctgactacaagcaacgactccagggcaggggccacatctcttttaagggccggcccactggaggagcctcgataatcatttgtggaaggaaggaaggatcttgtatagtgtgtgaaaggctctcagaggcaccacactcaccccctctggccgctttggggcccaggtttgcacaacccgacatcgtttgcaaagcagtggtcacactccattcagacgaggaggtcttgctacctccccactccccctcagatgaggaaacagaggcacagagaagaccccatccccagaggtgtgcacacagagtccaggagctgctgctcaggggggtgacatccaggcggtcggatgggagctggtgccacaaaaaagacaaggctctgtgtgcctctagcaaggctgctcagcttccaagggccaggctgggaaccagaggcctgatctcaccccatgcaaagccaaagaacaaagtctcccacctcaggtggcattttctcagtgtcattagcaaaaatgctgcttctagagcaatggttctcaaccagaggcgtctgggtcatccccccacccccagggacatctggtaatatctggagaaattttggttgtcacaaatggggagagagtgccagcatccagtggcatttagatgtcactaaacaccttaccatgcacaggacagcccccacaccagagaatggtcctgcccaaaatgtcagtagtgccaaggttgggagaccctgtctgtagtcactttcccttggaggtacccgtcctggatggctggaaagggaaagctttccaaatggctgggtccaagcctcttataatacagtcggggagtgcgaggccagaggtaaagggggacacccagtgtcatcggaatggacccaggctggacgcaagacaccccaacttgggctgataactgggggcaggcaggggagaggcgatctgccgagtgtgatgagcctgtttggcaaggtagcacaggcggggccagcagccctgaagtgctgcccactcctcccccgcccccccacactcctggagaaggacattagcttccctctcacgcctgtggcagaggaagccggctgtgcctttgaaaggcagcaattactggctgggacctttgtttctgaattcctaggctgtgcacaggcctccagaacctccgaaggctgggattctcagaagcttgcccccagcagcagagctggtgcctccactgcacaaaaagggcacagagttctggtagcagcgggggccctgggccctagtcctggacctggcaccaatgctcttctggtctcaggtaccctcatctgtgaaaggggaacattgatcctggccctgtctgtgtctgaggctgctgtgagggttgggagtcaggacgcatgccaaggcaagatggcaggatggggcaggccccacttagcatctgcctcctggccactcctccaggcatgctccaccccagggcctctgcaccgctgttcccaccagactgttgggatgctcctcacccctcctgtgcttccaggcccagaggccttccctggccaccctcccatctctgtctattcccttcacctggatttattttctccatagctcttgtcaccacttgacacgttatgttaaaaaccagtttctttttctgcttgctgcctgtgctcctgcctgccacagatgctctgtgaaggcagcaggactgctcaacgagggatcctgagtgcccgacacccgcaggtgctcaggaaatgtggctgaatgcaggcggggaaacagcagagctgaggggctcctacggcctccgctctgatccctgctctgtcctccagggagtgaggcactggggcattggctctgaggtcaagtgtggctccatccgatggagggctgtgcagtgagacccaagtgggcaggagcacggaacctgctaggcccccacacatcctagaacaaagagccccatccacactccctgcataccagaactttcctgggctggcctcgagcagggcacctgactgactggccggcggagtggacaattcagatggagctgcagtggcgcccgtggcatgggtgggtggtgcagaggccaggctcagcccctacaggagcctcctcagcctccttccctggggccaccctgacacaggaacccacacgcctgctggcaccctgagccatcccatcaggggtgagagtgtgtgtaccagtgtgagcccgcaagcacatatgtgtcaaaatgggggctgtgtgttcacccatgtgcaaaagtgacaatgctagcatttgactacaggaagaactgggtgtgggaatgttctggagtctgtgtgtatacgtgtgtgcgtgtgagattatgcaatgggcatatgaggaactactagtatgagggcagggagtgtgctacggtgttgggcagtattcacaccaggatacccaaatgttcaaatcccggctctgcccccgcagtctcgaatcctgagcaggtgacgtctgtggagtgggctaacaatagccctgactcgctgggccataagggctgtcagctttcacaaagcaaaggaagtactgttatgatgatatgtgggtgtgactgtggagtgtccgtgcagaggatcaggtgactgcgtgagcgtgtcgctcatgtgtgtacacgtgtgtaccacttggctgtgtcctccaggagcgcacgcggcggggctgccagtccctagctggctcagggaagcagggcccagatggccaccccctcgctccctgcagcccagagtttcagagtcggtcgctctgacatctccttcctgtatagcatctgctgcaaccctgacacgtggggcccagcccttggttgctgtctccagggacagggcctacgaccttgtgagtctctttttgggcttgttcaaaaaccccctctcccagaagccaagctctttagcaggacgaagctccctcccaaacctcccccaactcccctcctccctctccatggcccggccacatccaccctccacaggtccttacacagggtgctcccttccgggaccacttgtctcccaccctccaaacagggaaccagtcaacctctagtcacctctacaacgcagcacagatgtcccctcctccccaattcacatcgatgcaccgaacacagccctctaagccacctccactgccaggacagtctgcctgtcacttgtctttcttgcccacgagactggaacaaggatctgctggcttccaatcaagggagctttcctctaagcgcagtctccagtatttttttgtgtgtgtgaaaacagaaaatgctctttttggaagacatcaagatacaaagcacacggaagcagagaccctcagacaccccagctcccaccaagcgcagctgcacaccaatagaaaccaacaggcttctcccctgggctgcagccttggtcgtcatgggaactgccggctgcaggctggtccttgggagacccaccagccttggatctcggaagaactatcagctgcagcctgatcctccgaggggccttcagctgagctctggtctttgggggcagaacttcgactgcagtcctggtctttggggggaccttgatttgaggggaaaccactccaagctgtagaagctctcaggggacatatcagtagtacctctggcccttgggggaatttcagggccaaatggtggagctaatttcccccaaagggctcttggaggcctgcctctgggtgcagatgggcagtgaggacctaaggagatcctggggcaggctggggtggacggcaagacagtacctgtagcggtcagtggagaggctgcttccggtgtccagggagctcctgaggtggcaaaagcgagacagggttacttatggtcccacacacacagcaaaccccttgggggccatgtccactcaggccccagcaggtggtcccaggacaggtcctggggcaactgagcagccctgggaagagcgtctgccccacatgcaagaaaccatgtgctttctttccccctgctggctcaactgagaagctgccttgtctctaccccatggcaatgtcaagtcccactgccccctgttcagatggggaaactgaggctcaaggagaggaagcgcagtgggcagggttaaaggtcctctctggctggacccagacttaacctcgggtatgtttgacctgagccaccatgctccttccccaaagagccctgcaccaggaatctcagcagacccatgggtttgggcccacccagcctccatgccggcagcccaggggccctggagccctgatttcctgcccagagactcggcgtccagctctggatctgggcccaggagcctgggtcctgcctcctgcctttgaccaagttcggtctgtgctatggggtgtgggcctggagccagcccaactaggatcacatcccacctccacccatgactagccatagacttggtgcctgtcccctcacctctctgtgcctcagtttcctcatgtgtaaaatgggagtaggaaaagcagatctctcacaggggcaacgaatgcatctgaaaggactgtctcttgtctgctctgcctggcagcacacctcacattctgtgtcttcagggcgtggagtgatgctttcctggaggctggggggccccatccccacaacactgcctgtacctgcccacctggggagcatcagctatgacacagaactcatccctagagaccatgcccttggaataccctcttctccaatgccacctgccttccggcatggggcacccacaccccccatcgctgcctcacacacttctccccacctgaggccttagaagtccagggcacaggccaagcctgggcctatgtttggccacagtggggtttgacattctgggcccaagctgggtgcctgccatgggtcgtcccagctttagcctccgtttccctacttgctctcatacaagagccctgctggacacacccctggaaggaggctgaccttccttcccgtgtcccatgctggcctgtgattccgctacttcctgtctagctgccattgtggccgctggtagatcctatgttcagcagattcgaatccccaatgccaggccctgctccacacgccatcccttagggactcccatccacagcacaatgcctccttcttctccagccccagcagaagaggccccaggtggcacccctctccccttgagccagaacccacccagggccacactctgttggctcagcagctctacctgtgtggcagccatgccttgccaaagctcatgaagaaaagaagacatgaggggtggtgccaagacgctgtgagctcacttcctggactggtcacagtcctgtgcccaatctgggatgggcaacaggttttataggagggagagctagcggggtggcaagcaggccttccctgccttccagtgccagaacccacactgggcatggtgaggaattttggccttcagggagtcctggatctggacaagaggacccagccctccatcccccagcctggccgctcagctgcacacgagccacatgagatgataccgatacgatgcgacgaaaatactgcaaaatggtgccaggttcctgggccccacaggcagagcccactgttcccaggcccagggctgccctgccacagccatagagattcaactccccagctctgatctcactctggccacatcatgacaaactagcaatatcttcacctactgcagggagcccacctcaggctgtgttcttcccacacacttcatccgacccttgcattaaccttatgaggtacatggaatcatgctcccacttcacagaggctgaaggtatggctcacggagaccccacacacggaacaccattccattccctgcctccttatccagacgcaaactcctaatcgcccttcaaaaccctgctcaaatgtcaacccctttctctgtctaccttgcaccctccctcagcggactcctttcttccttcttcctttcctgtttccctcctttcctttctttcttctcctctctctcactttcctaataatagcaaatattttttgagcagtttctgagtggcaggagtgttaacacttcacaggtattaactcattgagctatgcaacagaggtacggtcacaccctacatgctgtggtacatgggtccaaggaattgagctgtgtgcaatactctctctccaaccagacagtacggtcgctgaagtctgcatgtgaagacgggaaactgtcaggtggatgcaatgtgcccttgcaggcctgctgtggcccagtgctgaaccccacagcaggcagtggcccctgcctgccctctccacttctccccacctgtgtacctgcacccccaccccccgccccagaaatcctcagtggcctggaacactcagcagttcctcccaccagctgcctcggtgccccacccctccaagacagtatagctaggactggctctgaatggagaccctccctctgtcaactgccttgttgggtccaagttgtctgcagccttgtccagccaagactgaggccttgttctccctgccgtcctttttcatcactcagcacagcagtgcacaggccaggaacaggccccagcaaaaaaggcccagagtgagggtgcacagggtccccagagagaaccctcagcccagcagtcctgaatttggaaccaaccccaacttgtgtgtgccccggggatagcaataacagcgcccacctcccagagctgttgagaaatgagatagtgcccataaagtaaaagggctttgcaaaccagaaaacgccattgcatgcatatttgagatacatcattattatcattacatagactagtgtatgttgagacgtaagagcttaaaggttaacacatgagttctagagccaagagggccagggttcaaatcccagctatgccacctactagctgagtgcccttgggcaagttaactaacctctctgtgccccattttagctttttcatctgtaatgttttgggaagattaaacaggttaatacatttaaaaggcttaaaacagtgccaagaacagagtcggcattccataaaagctagctctgactaggacaggactcaaaagatttgcatgatattcaatataccttatattgtattatattacatatattaatgtgtgataccaacaaaatacaaataaaatatattatgttaacatgcacacatattttttaacacattaactctatattaatagatatttgttatatatatgaatatatgagtctcattttatgtatgagggcactggggctcagagaggtgcagcaacgagctcagtggcacccagtttccctgaaggtttgccagccccaagtccagagttctgtccacctgctagagctgcatcgcttcccctgcttcacccccaggatctttggaggaccctggtccaggctcatggacacagagctgccagtcagctaggcagggctccagcccctcctccatccttcacctctggctcagagacaagcagcccattccagccatgctgagtgaggcccctcctcctctgtccccagtcccacttcacagcctcctggggaggctgcttccttttccttttcagaaccaactggttgccccaggcctacaccctggcactgcttctaaacagcacccgaccattgaagcaaagttcaagagcaggaaaaagtgctgctctgtgctgcacaaagtcaggagagcagccccagggaatgggctgtgactgtgactggcaggggcaggggcagggatcttggggtggggtctgttctgaggtcaggtgctggttacatgagtgtgttcagtttgtggcaattctacaagccatacgctgatgaattgtgcacttttctgtacatatataataattcagtatcaatttacacgaagacaaaaaccaaaccgtctgcctcacgttcagtctccagcaccagcctggagcaacagaagctcaggcctcaggctcagctggaactggtggtcatcccctttcttgcacagcacttgcgtggtcttggaaacctccctccctgcctcagtttccctctgctaaatgaggaagtggtcagtgtttctatcctggttgtagggtaaacaccctggggtgcttttaagaaatatggacgcttgggccctaatgcagaccaagttcctgcgcctagggcttaaaaaaaaaaactgtttattttgaaataaccatagatgtacagaaagttccaaacaaaaggtacaagatcctgtgtgcccctcccctagccttttccagagataatatcttgcacacctgcagtacaccatcaatgctaggaaagccacagcccactgggcctatggggacttcaccagttacacatgcctgtgtgtccacatggttccctctcacctagctgtgtgtggccagcatgatgatacagcacaggaccgtctcctcaccaggctctccgggcaccctctgtagccccctcacctcttcccaccagcccttatccctggcaactgcctatctcttctccatccccatcatattttcatctctcaagtgccacacaaatggaatcatccagtgtgccactttttaagaccggctttctgcactcagccccatgccctctgcattcagccactcttcggcgtggagggtccgctctgcctctctgctgagcagtgctccccggcgtggctgggacagtgtatttaaccattcatccgctgagggcatctgggcagtttccagtttgggggctgttatgactaggactgccgcaagtgttcttggaccggtgtttgtgtagacgccagtcttcattctctggaagaaatgcccaagagcccagatggtaggtcgtatggtgtgtgtatgatgagttttaaaagaaactgccaaactgtttttcagcatggctgtgccatctcacactcccaccagcaacgggtgagtgatccagtttccccacagccctcctggcatttcacgttgtccctttctatgttagccattcagacagacgtacgtggtgccatgtctgtttttttttttaaatgaaaggtctcacatatttattactgaacccagccaaccaacgcgttcataacatattcagagagaaaaatatattcccaataaaacatgtccaactctccagatagtggtgacattttctgcttgatacggcaacatgattgtgaccttgagacagcatcaatatgtgtgccatctcatgtgcaattctttatagacccagcttggttcttctccaatgtctccttttggagttgtgcctgattttattaccagttttcatccgaatccacgggggaatgggacgattttgctttattttcttggccaggaatcgcttactcctgaaagtcttgtgagaagacatggcgagaagcggactcaagcacacaccacgatgatggagaaaggaagagaggggactggctgtggttttaaccttgtttccctgttggggatgctgcgacccatccttccatgagcttctctgccacctgcacgtcatccttgctggagcatctatgtgtaccttctgcttcagaagctcccaaacctaatgcagaaccagtgaatcccctcgagccttccaagcttagacagttctgtccgttttaaaagaacccattcgctgctgtaagaattattccagaacaccctgtgctttctggaaggaacacctggatccaggcctcagggcggggtctaggtggccaaaggcagctctgagctgtctcagccagacgatgaccttgtgtgttcctgagacggaatgggaggaaaagggaaggaatgcagggaccacggggagaagggagactctgggagtcggctcacagccccagcagctgccatgactaggctcaccagcggcaacacactcctaccagcgagtgggctgggtctgtggtttggggtgagggcatgacccaggaggggcctgaggcagggacgcctcagactgctacagaccctggaaggggttgtgtgagtaatttgcctcagtttccaaaggggtggggaggccacagacctctctgttccactgtccccctccctcttattaaataagtcacatatattcactgtactaactttagaaaataacagtgaaacacaacaaggaaaataaaattatccaccattccaactccctggggataccccagtgttaatatttgaggagactttctggctgtgcctgtgcctgggtgtagatgtgttttagttacacaaaaatacgctccactctgcgaaacactttcccccacttcgcaccgtctctcgagtgtgtttctcggtctggaagcattcctcccctcgccccatggaaagctggtggagcctggcaggcgttcccctgcccacggtgggtgttgagcttggctgtctctctcgttggccctggtaaacaaggcagtggcttcaatagggtttctatgcacagccacagtctctcctttaggaccaattcccggcatggctggggcacaggagggatgttttttgggctatgggtacacccggatgtccacccagagatgggaccaacaacacactcctaccagcagttgactgtgagtgttggaccattcttagggctccagaagtttctctgtttggggcagaagcgagggcaagggaggaagcagtgggcacccttctaccctgtcccccacacgccaggccctggccctgcagtttacgtgtcagccattggtgtccacagccgagctatgaactgtgtcacagatgaagtgaacaagagcacgctgggtctgcattcctggcctccctccaccccgtcacgttgccagcaagaagggagcctaacagcgatgccaggtcccccaggcttactgtgccccttgagctcagggacgggatgcagtcagccctcctccctgggcctcctgaggctgaggcgcagagaagtgaagaggtggcctctggacttgagcccaggaaagccaccgtgtcaccttgtggtctcattccatgatccccgaggggggaggctgtttgccagtgtcacacggtgggaccccaggagccacggcagggcactcgggtcagacggaccctgttgggcctcagaagccacatgaccccgcctgagcctcagtttcctcatttgtaaaacggggctgatcagaggttacagcgaggctcccagaagctgacggctggaggcacctcataaactggcctgaggggctgctacactggctgacgcccgcctgtcctgcccaggcctcccaagccctcagaaggccacagaaggctcctgtccacccaccgccggccttcctgtcctggctctgggccacagaccgccctgcctgcgggcttggggccccaccactgggcacagtgcggcgattgtcccggggttggcctgcacacccctccatcctgccaaactgccctgcccaggagctcagcccgcctgtgtctggaacactccctcctctgggggcagatgggggtctcagtgaggtcttcctggacagagagcccagggtagcgaggcggaagccctggggtgagacttgtctgggcctcagtttccccatcagtgtcatgaggagttggtctagagaagtggttattaactctggcagggggagtctcaggccactttgaaatgatgcttcatccaatctagtctccatgcagcccccaattccaggtctaagagcttagcactaattcatttcacgctcaaccaccctgtgacaggagatattctcctccccactttacagatgtgaaaacggaggcacctagccatgatcagaggcataactcaaagagtgaatcagacagatgccttcaccacccgtgtagagcaggggcacaggcaaaatacacaaacaaggtaacctcaagtgatccagaaagtaataccaggagatagtggatgggtagagtggcgaagcagggggctgcccccactaacccggtccagagctgcctcaaggaagaggcgatcactgggccaaggtcacagagggagtacatgctgtgcaaggggccagcaaggacaaaacttgcagagtgacctcggaacatcctggcggaggggccctggggtgcagggtccaggcccggggtggggcaggccaggcatctactgcaggagtgaaggcctggcttgcatagagaggcccacctggcccaccacacctgccaagtagcaccaccgagatgtcccccccaccaccattccagcttcttctgtgacccccaaaggctccaccaaggactctcttcttaagacagcagcacgagtcatgagtgtctcgggtcaggccatgtccaacttctcctgggcttgcctgggtgggatcaaggcctcaccatgtggcccggagcctgaccaagcctgtgtgtcggtgtcctgtggtcctgagtccaggactgctgccaagtcctgttcattctaggcccaattcactgataggcaagaagtagagagaagccttagtccagtacaggcttgggggaggggtgtacctgcaatccttggagttcagccctcccaacctcatgtcctggccctgaaagaaccatctggcaccaccccatctacagggcaaatacagcttccagcaaaccctctagagtccacctggcctttctggggggtccttcctgggttttcagcctcccctccttcagatgtcagacccttcaggtgctgacaggatctcatttaatcctcaagccggcctgggaagcttaggtttcttattcccattttacatatgaggaaactaaggctcagaaaggtggagacctccccaagcctcctcagcagatacacgtatccactcagctcctgacctgagcctgtgggctctgtcccctgctccctgctgtaacgtcccgcaccacccatagtcagctcaggcggctgatctccaaccaggaagaacattctgagccctcccaacctcaggatggaggatttgctgaggcgagttttccctgagggtgtccttccactggaagtccttaggatattcagaaagcaacccaattcacctagcaacttacatattttaaaaatttcattttaaaatcgctaatgtatactcatggttcaaaactaaaatacagaagttgtcaagcagaaggtctccctcctaaatgttccatatccaccaggctcccaggcacacaatgcatacctgtaacgcatacatgttccccttgtctcttattccttacacagagccccatcttttgggcccccttataggatttctttatgtgaacataagcggacacatatgcacacagagacgggcggtatctatgtgcctgcaatgcatacacgttcccctggtctctagttccttacacagaggccttatcctgactgcaatgtgctcctgccttccccaagcaccacactcttgaactcactctctggccattcggtctcaggcacagctccccgtgtggactgaagacacagccaggggatggaggtggcctctgcttcacagctgccctcccagacctgagcccctgacctaaaacagtggtgggggacacagcgtatacctgctgggtgcagtggaggccccaggccaatcttggccctgtagacttttccatgcccaatggagggtctacaggacagcccctcaacccacaacacacactcagaaccatgctgccctcacacggccagacaagcacacacacaagacacacccttagcaccatacacatgcagacactacatgcacaacatgtgcaagcaggcacatgcacacgggctcttccagtgagtggcggggaacaccccactgtccccagccctggtcttaggtggccgagcacagacaggagaagcacctggcacagggtcacacaatgagcaaggattaggctaggatggggccccagacatcccgcctgccagcctgggggccctaccactgggcacagtgagatgattgtcccagagctggcctccaatgctcctccatcctgccaaactgccctgcccaggagctcagcctgcctgagtctggaaaactccctgctgttttagggctctccttacccactcccccaccccatgcctgcactcagcaactacatgaaaggaaaatctgcccccaggctccctgcagctcagggccaggaacccagacagcaggtgacaaaacagctcaggcttaactcacacatccttctcattaagaaaaaacattttcaggcctggcacagtggctcacacctataatccccatactttgggaggccaaggcaggcagatcacttgaggtcaggagttcaagaccagcctggccaacatggtgaaaccctgtctcaactaaaaatacaaaaaacagccgggcgtggtggcaggtgcctgtaatcccagcaactcaggaggctgaggtatgagaattgcttgaacctggtgggcggaggttgcagtgagccgagatggcgccactgcactccagcctgggcgacagagggagactctgtctcaaaaaaaagaaaaggaaaaaataattttcaaacccctgtgggccagacactgggctgggcacttccatacaaaccccacaggggcatgaaggttaggagaggccaataaaggctagggccatgatgtgctgagtgccactgtgtgcctggtatatgacctctgtccttccaaacatccttgggggcaggggttgttatctttcccacctcacacaggagcaagctggggttcagagaggtaaaggagttgtctgaagtcacacagcaggtgagggctgtctttgtggccagtcagcaccatccaggggaggacctggagggcagctgcaggggacctgaagccttagtggggccctggaaggagaacccacccccagcctgtgggtacaagggtgtgctggtttctggataaacagagagcccaacctgcctcccatccctcgccatgcatgagaggaaggagctggaaagctcggtctgagtgtgggggcttctattttaggggcgcaagatgctgtcacgacacacagtgttccccatgcatctgtctccacttgggacacagagcattttcctggcagagagctgcagcagggcggcaggccttgggtgccctcggcccacggggtgcctggtagctttggccagcggcggacagcgctgccctcagccaggtgggtgggctgagctctgggtgcaggaggtggatgggggggtagtgccctcaccagggcatgagagtggggatggtgccagcctctgacacatcctctcctgcggtagccatctcttcctgggctccctccaccctttggtgacaccaaggtcactgtcctgagtctgacctccttccacccccgacctccagacacaaggagctcaatgctcccaggctcctccctgggtgtcccatagggctctccttacaccagcaggccccaccccaggggcccatctcggcaatggcgctgccacccatcagacccccaggccagacccctaggcactatggtctactatgcctttgatgccctgttctcccctgttccctcccagtcttgggctgagtctctgtgggcaccctgggcacctctgctccagcagctgcctcggcctccccatcagaccacctccggcttttcctatcaccccctgaccacacagcacaggcctggcacggggtgccctctgggtgatgtgagagaggcagcatgggggctcatgcctggaatcccagcacttcaggaggctgaggcaggaggaaccctaggagttcaagaccagcccggacaacatggcaaaatccagtctctacaaaaaaataaaaaaaattagccagtgtggtggtgggtgcctgtagtccaactacttgggaggctgaggtgggaggatcacccgagcccaggagttcaaggctccagtgagctgagattgggccactacactccagcctgggtgacagagcaagaccctatctctaaaaaatgaaagaaggaaggaaggagggaaggaaaagagaaacaacagacttcaggctaaaggagacagtgtgggtctctggtcactctgttggtccagggatgactttggagcagcggtgaactcgacaggcatggcctgccctcagaggccacagtctgatgagaggattgggtatgctcagggttgctgtggggtgctacatgctggattggtgacgtgctcagcactggcctcaaaagggatgaggcgccggcttggggatggcatccaggcagcgggaacgactgtgctgagtgccactacgatgtgctgagtgccactgtgtgcccggtatatgacctctgtccttccaaacatccttgggggcaggggttgttgtctctcccacctcgcagaggaacaagctggggctcagagaggtaaaggggttgtctgcagtcacatagcaggtaagggccatctttgtggccagtcagcaccatgggagagtaaggcggggaggtggaaatggtctgtgcatgttgggatgcaaagaggaggcagatgtggctgaaaggaagggagtgacggtgggagtaggaaggctgaagagggcaggcaatggctgagtcctgcagtgaacaggctcctgcggtggggcccgggaccttacggctggatccgggtttgaagtcagcggaggcagatgcagttgtaggaagaggggtgaccagctcctgcagtctcagggcctgactccatgccctggctttccaccgatgggcggggtagccctggaaaaagtcccctccctctctggactcatgctgtctggacctgggcttcctgcaagggggccacctgcccaaggctggatgacgggcctagggcacatctaaggaacaaggacaggacagaggcaaagccacagctgctggggcagggtgggggccggtatgtctggccagcagcatcagccctgcccccggcggggctccaggaccgggagactcatcagccggaagctcttggaggaggcggctgccgtgaagacaggcacccttgctcctgagaggggcacccagagaaccaagactcagcagagggaacacagggctacgcccaggccccaggcctgatatccagagtctaaatcccacctcagcccaggggggagccttgagaggagctatgtccctcatggaccccagtttcctctgcatacgggctccgagccctgcactgcctccagggtagttcccaaggtcttttcccattacctcctacgtgagcactcagtaaaccaatacacatacacaagggtgacattaattccagccacagaatcccaggccacgcgtggcctggccctccctgagaagttgctcttgctcaggaaccccctgtgcagttcctacccctcggttctggcccacgaggctgggaatgacccatattatagatggggacatggggacagagccggcagcatgggcatgactgcctctcttcatcgttcctccccagggaggctcagagcagccaggaagggtttcccctccttgagatgctggtaaaaaggatttcaggttgatctggaataaatgatgagttttctcatgtaacatacaatgccctaggcagttttaaaaaatatctatcactaggaaaagaggaaagataaaatggtaagaataagtgttcgtttataggtcccagttggcaaagcaagagggggatgtgccagcccagtggtgcagctggatcctgaacatcaggggtcccaggacttacctagcacatgcagtccccagcccccaccaaggtccacagagcccctaacataccgagcccatgactccaggccctgtgctgatgccaggggccagccgtccggtgggggtgctgggctggcctccctggtgcctaagccagggatctggctgccctgggcctctgcacactactgaggctgccagctccgtccagacttgccccaaactgccaggctctcctctaactccaagcaaagcctgtggcctgtttctagacttggtttacccccgtcccaacaaacacacacatttgaattcccctaattcccagcccagtggttcggggggctgacctcatgctccagctacaggtgtggccaagtgacaaagaggctggccagtcagcacatggctcctcttggggatggagatggtttcaggaatggccatgagtcccagggctgaccagggggactgaggctgctgagggggctgaagcctccacacaggaacgtgtcctggggaaaggtgaacaggacatggccacaggagcattggagcccctggagccagccacactgaagccagatcgtgggctattcactgacagtaatcacggaaatccctttgacttgagtttctgccgtttgccacccaaaggctcctgatggatacaccattacagcccagcttcccttcccttcccttcccttcccagatgttcacatttcttaagtcctagcacgtcctgaagcccagccctgtgccgtgagaatccaggggaggaaggggacaggaataatctctataggtcacagagataccacaggccttattacctcattctgtcctgatggccaccctgcaaagctggaattattagcctcattttacagaaaaggaaataggttcagagaggttgtcttctgccccaagtcacacagacactgggcagcacataaggagttccatctgagcagctccttggagaggggtggggtcctggcaggggaggcacagagaaaggtcttgattacccccagatcttggaccccacatctgctgagctcacctggtcttggagagctcctctgaggtggcctgacctctctgcagcccagagatggccaggggacagacacccgaacaaggaagggggttggagagacttgagggcatttctcttttatctgatggtggagagcaaatgggaggaaaacgctcggtgttatcgtggggccaatgagagccttaagatacaggcagtgaatttcagccagggccctggtgatttaagatgcatcacttcccttagtaaccatgccaagcagatgtcagggacatcttgatgagggatgaagccatcggtgccaataaaacatttttctattagccacgctcaggtcagccgcctgctgagccacaggggttgctctgacaggaccttcatccttcggaggtcgggccagtgtggcaaggtcacgccatgggatataaagggggacgggcatctctggcgcagccccagctcctcagagccctgatatcccaagctcatgctcaggaaatgggatgcacaggggagggagagccgggactcctgggctgggcagtctagtgggcaaagcctggcccctcagagagccgacaccacgcccagcctggcttccccactgccctgttcactgccctagtcctgcccacaacctcaccagccatgtcccagctttccttcaaccagtgacaagtcaattcactgaaagctaattcatagaacagtcaatttgtagaatgacaaagtcataaaaagtacttgcttccttcccttaaccttttagctttagttgactggtccatttttgtcttcaaaatggcatttgatggaatgttatttgtctctgtcccagctgcccactgtggtggcaggaggcacagacaagcatggtgactgtgtcatcaggaatgctgcgggcacagggcagaggagggcaggagtggccgtcagcagggctgttctgcaagcccaggggagcaggaaggcccacctgagaagaggcctgggctggggctggggccccggttctgggaggcattgggggacaatggataagacctctgctccatcagccagctgaaaccactgcctgctggcagagcagggtctgaaactcagaacccctgggggccagccaggccccagctggcagcaaaagggacttgtgtttcctttctggggtgaggggccggccccagtgcccctggtgggatgcagccttggagagaagggcccaaggtgtctcaggtgtcagggagtggagggcagtagaggttggtgaccatggtgcaccaccaaggaactgagactgggaggtcactggctgtctgctgtcctcaattaccagggatctcagcctgtcagacctgatacccaccctcaccttttaaaaattaaactttttattttgagataatcgtagattcatttgcagttgtaaaaaaaaaaaaaacaaaaaacaatacagagagatcttatatacatcgtttcccccaatggtaacatcttacaaaactataggatccatcactaccaggattctgacactgcactgtcctcccatcttaggtagctttccgattttgcttgtaccgtggagcctgcatacatgatacgcctgcatagaactaaacacacgcatgcacacacatacaggcacatacaagtgccaccacagtcaaaatacacaatagctccattaccacaaagatcccttgtccagcaccccgctccttaaatccagagctttgcactatcctcttctctcttctcaaatgaagctgatgactcatgtgatccatccacacacatatttaaaacagaaccaagagaatggctgaatggtaaaattacagagaaaaaaaaagaggaaaataatttagaataaaataaacggtaatttgtcatgttaatcgtgggtgggcctaccctatagtcacctgcctggtcgtgtgacagcgaccacaaacccagatggatgctggagttcactgggcactctggcaccatgagagatgctgtccttggtgatgtggtgctctgaatggtggcagctcttggctgagctccgaacatatcagagtctgatcttccctcgactgcgagagcagttgcattcctggaaaactcaatgcatattcaaatcatacaaaatgcattttgtggtttagatgtcaagaggagtgaggaccagactcggatagttgctcgcagattttcatgcccataaatatctgtgtggattcttggtgtgggggcctgtcctgcacaacctaggctggccctgctcccacatgccctctggcagctctgcctgaatctggggcccactgtcaaagagatgctgataactgtgcccaggactgacctggacggagagccagctaaggtgacaatgatgaaggcttgacgcataggcttcctggagatgtgtgggggtgttcatcttggaatgttcaggcccagtcccaccagcctcccttctcctgcctggggaagacacacagggcttggcttccttcatggaggccccactgcaagcagctggccagggcttcccatggaaggagaccaccacctcctgcaggggccggctggtcacacatcccccaagttgagcgtttcattggctcaaatccagaaaccacaaaacagtggtgggaaaactaaactgctctgtgtcaccagcttgctgagggagcacttcaatgatgaagcacacatataaatgcacagaaattcaccaaggacccaaaggaactggacacagccgtggcctctgggcagaagaacaagaagcaagggaaccaaatagacaatatgtgcagcctttttttgtaccatgtggatgaataatctctcagttatatgactatatttgaaaaacaacaaagacgtaaccatcccttttgtaagctaaacttcatcactcacacttttattcaagagggggaaatttaaaaacacaagataccacttcacaccattaggatggctattattaaagaaaaacagaaagtaatgagtgatggcgaagatgtggagaaaccaggacctttgtgcagtggtggagggaaggtaaagcagtgcagctgctgtggaaaacagtatggcggctcttcaaaacagtcagcatccaatcacaatctgacccagcaatcccacttctgagtatacacccaacagaaatggaaccagggactcggagaggtatttgcacacccatgttcacagcagcactattcacaacagccaaaaggcagaaacaacccagtgtccatcaatgggtgaatggacaaacaaaatgtggtccatccgcacaatggaacagtgttcagctttaaaaaggaagttctgcccattgccgcagcagggatgaaccttgaggacatgaggctaagtgaagtaagccagtcaggaaaggacaaatgctgtctgattccactcacatgacatccccagggcagtcatattcacagggacagagagcagaatggtgggtgccaggggctggggatgcaagatgggagtctgcgcttacagagcacagagccctgtttgggaaagtgaagttctggagatggatgctgtgttggctgcacggcactgtgaatgcacttactgccgctgaaatgtgtgtaattaaaaaaggcaaacatgtggtcgatctgcacaacgcaacagtgttcagctttaaaaaaggaagttttctgtctatcttaccacaattttaaaaatggtgatttgtaccttgtcaggccaggcccctcagggatgctagaaagcaaaggcaggacttccgggcagctggtgacaacagaggggccggcactgtgtctgtcacagcgaggactcgccacgcgccatgcgggagctctatgagggggcccatttgcctgggggagtcaggaaagaggcacaggctgggctgtgaggtctgaggtgaaggggaagaagggcactcccggcagaggagccagcatgggcaagagtgtggcagggtgagccttccaggcagggctgggcaggagttggaacgttgtgggatcgtgggaggccaggaggaccaggagagagggcctcaggccccagagcggctgaggagagaggggtgtgtgcaggaaggggcgcccactgccccaccccgttctcttcccagctgtatccaggagccgctctggcaggtgccaccaggtcttatttactgtgtcccttctctgggcggtagctccatgcaggcagggcgggcctggtccatttacaggcgtagcccacaggcctggcgtgtgtcaggacgtggactagatgtccagtgaccatggtgggctgagtgaatgaatgggtgagtgatcggcaggatggggccatgtgaatgagccagcatgcctggagctgctgtgcctggcagacaccactcctcccactcccagtcccctgtgtgtcgcagcataaccaggaactttccagatgaggtcagaggcccagagagggcaagcagcctgcccagggtcacatagtgaggcagggacagagctggagtggagcctccttgtcctgctctgtaaggccccaggtgggccagggcctcagagaccaaggggcaggatattttcatccactctgcctgcagggagcctcctgggggtaagagtgagatttgagagaacaggagccatccaacaggctggaaagagcgggaagggcagacgggggctgtgtcgtcagtaggcttttgggggaaagcagcaggctctaaggtaagcctgggagcagcttagccagcacccaggagcaacgcctcctaagcccccactggtggtgacaaaactggtctggtccacaggcattgggtggggggctcccagccactgtgggacaagtaccctcagcacccaggacaagcaggctgggggcagccatgccacagtggcagtgaccaacacattccaggtagtgcatgcagtggggaaggggtggggagggacagagccttgcggccaagagatctggaacctgctcagggtaaggcgtcaggtcccccaacacctgggccccctgaccaccctccttcccttcctcatcccatctctgtgcactgggtgcccactggccccacccacaagggcacacagatctggctggggaggagcagggtctggagtcaggcagactcactggctgtgaccctgagcaaggcacttccctggaaaacaggatggcacacaaccaccctgccagagttgtgggattcaacaagataaggcacttttgttgttattcttaaagaccaagtgagtcagtgcaaggaggcaggccagggccctgaggagatggtgccaggtcctttaggggcacagggggccttggggggcttcaacaaagggcctccagggagggacaaggatggcgtgacacttgttgagcttggggcccagcctgcttgctggcccgcaggcaaaccctggaaggggagtatcagccccaccacatagagcaggaggcttaggcccagtgcctgtgcttggggcacttgggaaaagatgctgaccatgggctgaccaaggcccagcagggtcctgccccggggctggggccaatccaggccttacgcttcctctgaggcccagggaggatgtggatgtcggacctgtccttcacggatcctttggtggaagatggtggcaggtgggtcagaggtaggtgcttgcctaagcagacgctacttgttgccctgcctgtccagcaactaccagaaaagtctgttcctctcagtctctaaaattcaccccagacagggtctctaagtcccaacatcatgccaggccatgccagctttgggtatacaacggggagcaggcctgggccctggccttgcaaaggggcagaggcagtggccaggcctctgaattttcaggccccaggctcatgacaccccctcatggttgggaggccccaatgcagttccccaacctctttaacccccagtcttttcttcatatctttagcttccagcatgacgatgtgactctttactccagggcctccatgaacagccccagcccctttacctctcttcttggtccactctgctccagcaacaccatcctccctctgtggcccaatcctgtcaagcatgccctcaccagggcctctgcacttgctgtcccctgcacccggggcccccactcttctcctggatagttcctcctaatcatttagatttctgttcaaaggtcacctcctccaggaagccctcctcacttcctgagtggccacacagttcactcaatccattcccattgggctctctatcttcttcatttctctgtgtccttctcccctgcagtatcccctgagagcagcaccctctcagtggttcccagcactgagctggacatacagcaggtgcaccatgaacactagctgaaggcagggaagtgaaggcccaggcctggttatgcggccttggctgcatatcccagtctttctgagttataaccaggacctgcccagtggcttcctggggctgtaaagggtggatagatgctacagcattcttggaaaatagcccagtgctgtgtgggtcattcataataaccatttttaatagtgatcactgcatggcaagaaaggctaccggtcatcacacgtgcttgagtgaagactgggcctccggttccctccctgcatctctctcggtgggctggggctgctcttccctggcatccagcccaggcccactgtccagcagatgctgataactgtgcctgcagaactgacccagccaaggtgataatggtgaaggctcaatgcacaagtttcttggaggtgtgtgtgtgtgtggaatgttccaggcccagtcccaccagtgtcccttcttctgtctaggggagacccaccagggcttcgcttccttcatgaaggccccactgcaagcagcaggtcagggcatcccaccagagggagaccactgcctcctgcgggggccggcaggtcatcatgtcccccaaacagaaggaagagaggggtcgggacagttccaggcagtgaatgaatgattgaacaggcatgggtaggcgagtgctccactggcctggccaagcagcccacatctcacacaccacaaactcctcacagcctcacttcctgtgttcaagtgacaggatgtgacatgcccatgaggacagaggggccccttgcagagatgatgaaaaggatgctgtagttacagaattgagggccatccttcattcagacaccattcatgaagctgccagtacagcaatgacctcaggtgttagcaagtttgattcagggtctgattcttggaagcctcctgatgttcccccattgggttaagaaatcttctcctgcttttgttgtcatcctttatcccatccagtgtgccaccttcacgatggactgagccctgaccgggacagagtctcgattccataaagctcccttgggtgcacaccaggggcccagagagtggaagtggcgaaaatggaggctagggagtgaggacagtggggtgggggtgggggcccgccggcagggctccactaggctgaggatagcctggctgtgccatgcacagggccgctggagcaagtctgtcccgatttgacatgtggcatgctggggaagggacaccactgccaaatgtacggcaggaaacagctgtgtgaccccagtcaagttccttcccctctctgagcctcagtttcctcttctgtaaaacgggatcgacagtatcacattttacagcagttggtgagaccccatgaggcaactaagcatgagaacgctttgcaatcaagttgggcagctctgatagtggctacagtgcaactgttgggaaagttaaacatctagagatgctcaacaccccatctcctttccacactgaaaggcagggtaacaataaggtctgagcagcaggtgctgggagagcctgggcctagaagtgggcctgccgcgggttctgggtggggagtaatggtgggcaaacacaggcttatcaagtgcagcagggtaacctcaggaaaggcctgctcttggttacaagatccttgcgtacaaacagagccaccccctccaagtatctttggtatttctggtgccaataggtttggtggcagagcggggatggcctgggagtcacaatgctcagactgggagcctgagagctggagaagagtgaaaagacccacagaaaagaaagacagtgagcgctaagccccctcgggccagcccctctcttaggcaggaaggctagacgagcttattccaggaatcagcaaatccaccagagccacgtgttcaaatgcaggtggctgggcccccaacagattgaagcagactctccagggaagagtattggaatccatatagaacattgtccctgcaaaactgcaattggataggcttgggcaacgcagccacagtgaatagctgcatcacgggaacatcaaccacacctggacattaaaatcatccggaaaatgaaaaagatcctgaggcttgagccctcccccaaacctagaaaccagaatgtctgggggtgggacccacacagtttttttttgtttttttttttttgtttgtttctttaactgctcctcaagtgattccagtatagctcctgggctacaacccccaccccaggctagtatactccagggttccagtagaactgtgctgagcctcagtttccccatctctaaaatggggttcttagtgcctgcccagacaaggcctttgtgaggatgacatttctgagcattggaggcaagcaggcactgggccaagtaatctgaatatgaattgtcacatttcatcctcatgacatctcccctccccgatgtaacagccctgagagtttagaatttctctggcatcaggctcctgggcccaggcaaaggtgtggcagggaggagacagctgtctcaggaggacctattcccagccactggggtggaagttccacgctgggaaaggatttactatttgtttcagaaaatgcagcgagggccttgccacagggagtgagaactttggtgtgctctgctcgcatcgacaaaccaacctgtgagcttctccactaaaaaagcaagtgagcatcacagcgaaccagaggccaccgtcatccctcgaaccagaggccaccgccatcccccaaaccagaggccgccatcccccgaaccagaggccactgccattccctgaaccagaggccactgccatcccccaaaccagaggccactgccatcccccaaaccagaggccaccgccatcccccgaaccagaggccaccgccatcccccgtgggttgccgcctggcactgctgacgcagcagaggcagaggtgtgtttactttccctcagtggaggtgacggggagctgccactctatcaggggttccacaggcccctgccatggtaaggggcctccatcgattagggaggccttggggtagcccccagaaggctccccacatactgctccaggcctccttttcctagccttgcgactgagcccagctcaagaggactcagccatgctctctaacctcctaaggtctgaggtcactgcacagccccaaatgagtgggtcctgggcaaatagtttaggcaggtggagacctgacgctgggcctcaacccccgcagccgagggtcccagaggagggcaaaggttgctcctcctagaacagcacagtgcagcgcccagagagctgtgagggaagctggcattcgaaccccactgccccctgggaagcctggctaaccgaagcgcaggctttggtttccataaatacccgggcccgtgatgtcaccgccccgtgcagactttcacagcctctgctgctggcgtgaggcccagcacacagccgctctgctgccagcccacagaacacctgggcacacagctggacactgatgcctccgtgctagggacggtgggctggaccttcacctgcccttggaggacgcagcatcctggccactgcctcagcctgcctgcgaccttctatcaggcatggctgaagggctggccatgggcgtgctgggcagagattctcttcctaaacaggctatgggctaaaccaaagccaaaacagtaggagccggtctgggcaccctgaatgtggatctgggaggggggatacctgctctcacagttgggaatttcacagcctgctgaagacctgctgactaatagcctttttctcatcgtcatcaccaacaaacacctccgctgcaggggccgagcgccggcatccctgctgggtggccagctccctctgcaagtcacctgcacatccacctgcccctcccccaacgatgcccctcactccagctcccagctcagccgggcccctctggcctctggcttcaggcagaaacctgccacatatactcacaaatagcgtcttctgcaagccatcctgtgtgaatccgttcttccctgttctggctccctctccagcggggaggctcaacgtgtttccaagaggagcaggcggctcaggcaagaagtggaggggaataaaattaaatcgcggggcgagtcacattcccgggggtggcgggctcctccagggaggctggggcgggagcggggggcggcgccagcagcgggctgtggagggccctggcacgtagcgcgcgctcacaccgtgcccaggagcgagcgaggacgtcgagtaaccgtggtcgccaggctgggcgggggcgtccacctcgctgctacctgggcccaccttggggtttttccctcccgtccatccggggtgcggggcgcggggatgaggaggggagggtcgagagaaggctgccccgggtttgctctcgcagcatccggagaaggggcgggcgcgccggagcctcccccaccccccgcgcccaaggagcaacgtagtgcggccgcgccggaccaatcgccgaggcgctggtcgccatggcaacagcagcatcaggcgcggccgctcggctgcgccctcgcggcaaagtcacacacccggcggggcgcggggcgccggccccttcctggcccgcgctggaaacctggaagtctgttgctaaaatgcacgcgccgcgcggagcctacgatgacactactttccaaggcggcttttctgccttcggcactgagacacgcgagccgcggagctctcggggctctggccctggagtgaggccggccgactccaaggctgtctctgccactgaagggcgatgagaccttggcaagccgcgtctctcctgggagtcttgattatgctactgtgaaagggatcataacagctataccacggggttccaggagggcgcaccacgccagtagctgcacggtggatggcagagcagtcctcgtttgtgccagtcctgtcccaaagggggctgcacgtggctagggagaatttctggtctagctatggtgcctcttcctctcccgaggaccttccatgtgccgggcaagtatctgccctcatgatgtttacagtctaaggggaagccaggaagtaagtgtgcagatataggattgcacgtggtgataaggatcaggatgaaaagagagcaggaagaggggaggcagggaccccaagagaggcgggaaggaggcttctgccatcagacggggtggtcgggaaggccctctgtgaggcacgtgtggctgagactcggatgacgcaagaagcaggggaggagctggcgtcaaggctctgaggcggaaggcagcctggtgtatttgactggcccagaggaggccagcgtggtgcagtgtgcgacagggaggtggaggggagaagcgcacatccatcctcggctcccacacccgcctttcccacacagatttctctcttcctgtctgatgttcatctgatcctctctgcttcctcatctgtaaaccaggaatcccagacctatctcagaggcatgtagataatattcttccgtgcacggtaatcctcaagacaaccccaatgaggcctaatactatcatcctacttcacgggggagcgcattaaagccagaggttcagcaac

SEQ ID NO: 284 - DNA, 23552 bp, Homo sapiens
  source 1..23552: mol_type = genomic DNA
gttataagaatagtaatttgattaatatacaccagaatgtggactaacaaccatctcaccctgacacataaaaatgaatgaatgaaatccactagaactgcagaagggtagtattttaacttctgctggccccgccttccctttctgtccgacatcaaggaccctcggaagatgagatttctccgatccacacaccccacaccagagcatgttatagtgatttgctaaatgaggcataagtctgtctcacatacgttctttttccacgtccgctacaggttcgggggctcagaaactttttgcggcttcctgcctgctgccagaaaggcagctagtcccccacgcccagccgcaagtaacactggaaaacccgcctgcgctgggaagaccctcgcagcccgctctgctccagtcccgcaggcaccttcttgcgcatgcgcacccactcgagtgccgccctctttccccccattccgtgacgtcatccagccgctcgcgcgcctcgcgttagaatcactagctaggcagccttactgcgcgccggaagtttgggccaccgtgcggcccgccctttccggccagactgaacgcggccccatctgtcggcttaggaactgggaagggcggaagtaaacgagaaaaggcggaacctggtgaaactggtttcccgctgctgccctcattttgcttcgccgaacgtcctccctgtgttatgacgtctggtgtcccacttgactgggaatccagaaacagggcacacagcagttaataaacacctttgatttgtgtctgtggaaatacgttttgtccagacgaaacatacctcaagacaacatattttgcagaatagcctcacctgtgggtggtgctgaaacgttttaattttttttaacttgacttccctaaatcctacatttgagaggcctacaacagctctctagggagggtgtgaaggtgtgagtattcactttgaacaaatatgtgccagtcatgctgctaggccctggaggtactgcagtgagcaaaacagacaaaacccccactttcatggggcttaagttcatgtctactgaatccagtttgctgatttcaaataagaaatgagaagtgatgacacagaggctttccagtcaggtcattacaaagaaaaagtgttatttcacgtaagagttaacacctttttaactaccagcgatttgacccatgccacgaagggaaaggatttcttgagaaaaccccaatatctaaggaaatggccccaatttatttatacttggagcaggacagagattaagggaacagtggacacctacactggagttgtcactcctggatctatcttggtggtgccttcagtccatgaaaagtgaattgtacagtaaagatggggtcagcatgggaggaggaccagcttataggagttaccagcctaaggctgtctggttcttagctcagagggaatcagaagctgagagtagaaagtagtcttctaattttagaacgttttccttccccgcatttatttaattttcccatggtggttaacagtaaatccctaaaagactgatttagttcattcatttattccagcaacaaatatttgagaacacactgtgtcccagacactgttctaaggactggcagcgaagtccaagacaaacagtccctaccttcagcaagtttgcagtcaagcaggatgcggatgctgagcattacaagggaaatgattattctgagagaggaagtatggggtgctatgggaacatacaaccagggacctaattttatgggaaagggaccagcccagatccaacacttgctctcccagtttacctccagtaggttctttttaacttgaactaatcttgtttggtggggtacacagtgaggaaaaagaagagctagtgacaaaatctaactcccttctcagtcttaagcaaggtgaaggcaagggagtagaagatatcaagggagtgagtggtggtagccaccaaaggagatagcagactgaggccctaaaaaaagaaaggaaatctaaatctatccagcaggaccagagaaagagtgctgagggtgattagatggaatccctgcatgtactctcccggcattctgaaaagaagccaaaacaaggaagaaaccggggtatctagttaagacctcacaaatcactcatccattcctctgacatgttcataaactttttatagtggttacgaaccaaaagcttggcatttcttggcacttttccaataccctttaccagctcacattatctgggctcccacccaggctacagatagcctggctgttagcacttcacagaagggatatagactggcccagattcaagagctgcccttctaatttacctacagtgggtttttaactttgagttcccacgtagagatggggcagccaaatatcaagcccaaatccctcacttcacctactcaacaaaatgacccccaaaatgtaaagtttctgtgcctttaatgcttcccggtccctaaaagcccaacttttcctcgaagctgggcacctgacctttagccaggtttcttaatcttttcatgcttttcataatagcaaattccactaggtctcttagaaactctaaaaccaaggcttaagcactttaaataaataagtcctcatgtcaccactgattttgaacttttagtttttaaaataaggctagctcaacttttgagtcattttgaaaagttggagatggcctggtttaaaggtaccagactagacatgggcttccttactatgtcccgacacagacagataggcatcactattcaagaggactggggcttgcaaccacagattagcatcttatttgccatttaggtcccagattgcttgagcccaggagttcaagaccagcctgggcaacatagcaagacctcatctctacaaaaataaaaaaaaaattagccaagcatcatagtgcacgactgttgtcccaactactcaggaggctggggcaggacgattgcttgagcccaggagcttaaagctgcagtaagtggtgacttgccactgcactccagcctgggcaacaaagcaagactctgtctcaaaaaagaagagaaagctgaaagggttagagactcagcagatgtttctagataagaccagtttgtgacagatacagctgcattgttctataccactctttaccttcactgttcacactcagatacctccactagtaagggagacaagcaggttcgtgctaggtgagcctttccagaagagtactgcccagcccttcttcatcccagccttaacacactcaacaacccatttcttccaactgcaaaaaatctaaatgatactgtcccttttgtagtcagagaagtacatcttagatccccagctcagtctagctcagagaagaaaacaagaaaaatagagctctttcctcttaaagctaacacctgagtcacatactgtcacctaccccctctccctgccgcccccccaacacacacacactggtatttgagtggtaataaggtaaatgcctgacaacctattcttccacagaatccctaggctttctgtgtcaacagcttccctttagaagccaaatttgtgagctttcactccacaggctgggtgactttcagactttggcacccatttctatttagatatcaagcatagtttctaagcaaccagccagccagctcctctccctctcacttcccccatcagggagccagcttactatactagcagaacaggtcaaacagagctcgatcctggacaaatcagtgcttgaggaaactttaacaaaaccaaggaaaaatgtggtacaagaacaatgcagaaggattctgttccaggcagtttagccttgtacaagtagaagaaggtcattgagtccgttctaaagctggatgcaatttcaggcactactccaatctcttcactttataagcaataaatctgaagcccagaggttaaaggacttgttcaaggtcacattggaagcaaagctgcagctagaactttggtgtccaaactcccaggccaaatctccttctactatgctatatcatactaccattaggagatttgaaaaagaaaagcaaagtctgaagggtgatttttccataaattaaatcagctttaaatctaggcatatttggagaatcacaaacttctaacactgttagagaaaagagagatttaaaagctggttaaatctaaacaataaaaaaatccatatgtacaatattataaaaaagagaaggaagaagatggcattcacaattactggggaggcagggcagggggcagttgcatgctgggggtgggctgcatgggctgccagctctcctgggtttgaaggatgcggtacagctgcttcagctgagcaacgatgttatccttgatgtctggggttgagatctgcaggcggacactgccactatcaaaggatcgtgtgaaatcaccagaaaacatctcgtagatcatccgagccactactggaatgacctgttcaggacacagaacacaggtgtatcctctgaggaaaaggtatttttaaatagcacaatggacccaagattgaaggacagaccaaagaggccctgaggaagaccccattctgatgtctaaatataggatatgccttcatctctctggaccatccttctgccaaggctcactgtggaagttggttcaaatgaaggtaaagaacctagatgtaacattacatcacaggcctaaataaatgactgcttactttgcaagactttttacaaaatatcatctattgcttgccttgctacacaactccaggggcaaagcccaagtggccttgctgccacttcctagaataaatttatattcctaaaagtaactcaaaaggtttttctaagaaaggctggaaagggccaggtatcgtggcttacacccataatcccagcattttgggaggctgagacaggaggatcacttaagcccacgagttccagaccagcatgagcaacatagtgagacctcatctctgctaaaaataaaattaggccaggcatggtagcctgtgcctgttgtcacagctacttgggaggctgaggtgggaggatcacttgaacctgggaggttgaggccacagtgggctgagatggtgccactgcactgcagcctgggcgacacagcaagaccatgtctccaaaaaaaaaaaaaagtgcaatttacattgtgtgtgtgtgtgtgtgtgtgtgtatttgtgtgtgaagaaaacctggaaagggtcatatcctgtgaggtttcagcaagactctaaggttagtaagagaatgaaagataagatctccactaaatcaatcacccattttaaggaccctgccttttccagcatgagtcctactgcacaaacctgagtctgttaccccatctgatgagactgaaacctacatgggctgatggatgcttgatgagggctcaacccagacctgggggcttaagcattggcaaaaagatgaagagttgttgacacagccttatcttctcacctgaaccaagatgagtttcctttccaatggtttcccatctggccattcttccccaaagcataagtagatctcaaacggtggctgcttctctatctgtcctttctggtgggcaatgagatctgcagaaagtggaagagcaagtttggtatactgggtcattccacatccactcaacaaataccatcttttatgctgtccattacaatagccactagccacatgtgctcactagttttaaattaattaaacagttcctgggtcacattagtcatatttacatgctcaatagccacatatggcttgtgacaaccatactgaatagcacaaatatattgaacagtacaaattacagagggttctcttggacatcattgatcatgacttgcagttcaaaccacattgtaaaaaattgacatcacggtgctttccctaaaactgcctgcttgaattcaccactcagataattcccaaaagaatatgtgctattctgaacataacaaacaggattaccttccaaagttaaagacacgctggtaacatttgaggtgtaatgacagggctgtctccctcttctgccattgaaggagccacaaccaacttaaaaatagcttccaagtacatagctttggagtgaaactcccttctttgttgcctaggtcacctccaatttttagaaccaaagttctgttctcccttgacctcctccagactaaattttttaagatctttgccatgccaggaaagcaggaaggtgaaagacagggatagtggaaggaatgtacttccagagagtgattcccacgatcaactttctgagaaatgacttaccgctaaggaatgtttccagacaaaatagcttgaccttcttttgtctctcaatcaggttgggagcaacaagtgatggggcacatggcccagaccagtacaccttgcactggcacagcctgatggcataaatggcatgaccgctgacctccaggatcagtcctctgtccatgacgtccagcagcttgctagtgaacagcttctgcttctcattggtaatatgctcaggacctgggaatttgacctgctccaggctgacgggaccaaagagctcctcctggtcaggcatgggacccaggtccccatagaagagtcggcagccctgagggttgctcacggtcatggtctgcccgtactccttcccacggtactgaaacttgatgtccaggtcagtcactgcaaggttagagatgacagtgagagtcctgcttcactgctctgcctgttcatccctgtgactcatgcaagtccattaagatcaagccacctttcaaccagcattcaggaaggccactgccatagttatccttcctgcaataaagggagacatcaacatatccctggaatattcactcaaaaggctgcctgaaagcaaacagttcaaagtccatctcaactatttctgttcaatcaccacaccccaaaggctacaattgcatcaagtaaagtggtcctggtgtccccacgctatactgactgagtcttcacaccaatggtcattggaaggagctaaaaactaaggtatcttgtttgtgtatcatttttagcttattgtttaaagaaacttgaggaagaagaagcaataccaaacaatttttctgaaaatgacatgtgaacacacacactggggatctgctctaataatataccataaaaggacacagttcacatcaaagttaatttttactcagcaaatctccattgaacccaatagcccctatcaaagctacttagcctcttggacaaaattttattaatagcactcacatgcctaccatatgtagtgtgaaagggagacccaagcaatgacattgattcgtcattgagataaattcgtaccaaattcagaaagaggtttttttctgtaggtcctaaagcctctcaaaatccaagagcctcctctaccaaatccatggccattaacctccctgttccacaactggccttgtcactaaatccccctgcgtgactgataaatctgggactcctacccacctaagacctgaataacctggagctggagctgtaaccaatcagagcatccctatgggcaagtaagtgtcagccaatgtttttgttgttgttgttgttttagatcatgtctcattctgtcacccagactggagtgcaatggcatgatcagggctcactgcagcctcaaccttctgcattcaagtgatcctcccacctcagcctcccaagtaacagggaccatgggcatgcactgccatgcccagctaattctttaaaaatttttttgtagagagtctcactatgttgccaaggctattctcaaactcctggcctcaagcactcctcccacctcagccttccaaagggctgggattacaggtgtaagccaccacacccagctgggccagtgtttctttacttcttccctggtgactcatgggctagccaggaaacagaaacagaggatgcctctgagacaggtagtttttcaatacatggcaaagaaatgaagttagaaagcaggacaggaaagagtctataatagaagcagaagaccgagcaagaaagataaagtctcacttacttgggagagagctgatccacagttctggagagctatagaagggctgtataggtgcctggggtacttccatctccaggggttcagttttgggccacactgcctccgggctgcagttgcccacactgcaattgcccacactggctggcgccatgggagaacctaaaacaaaagcatatggtgagcagacaggggtaccacacgtgcacatcacttgctgatgctctgagaactcacaaggtcagtagacaagaaccaaacactgaaccctgacccagtgtgatcttccagcccatcagtgattcccataactaacgcaataagaaataaggttcccctgctcctgcttcctagtcatattatttctcccacaaattcatagttttaaaaacctttgtttgctgaagattaacatagacatgtgagttttctctggaggttaaattacaaggagtaagacattccatactgtaaaatttggccccagcaattaaatagaagctggttgtcttccataaaacgaactcagctaaattagctgattagcttcgagtaagtgttaatgcatagaaatacctttaacaacaaacaaatacttttacatgcataaaatgtctggaaggatactcaagaacctagaaggatctgactcctccagggaaagaaatgaaaggttcagggacaggatagaaggaaaacctttccactgatttacctttttgtaccattatgaatgtaaaccatgtgaaagtattatttattcaaaaggatccaattaaaaggtttaaaaaaagaaaaaagagtatttccctgctactgtcaaagttgacttgctccaaagtctacagatttctcctcctagcctcacctcttaggcatctattcttcaacaattcttcatcctctgccccaacagctctgaaatcacaaagattaatgtttctttgacccttttttttagatcatgtctcattctgtcacccagactggagtgcaatggcactctggttaaatttatgggaactggttaaatttatgttcccattttacttttttgtttttagtatctattctacaactttccaaaaaaggattaaaggcagctcaaaacataaggacacacaaatattagctttaataaaagatcaacagaaataggaaatcaggatcctggaaataaactgcatccttttagggggtgagaataacagaatgagtcagccagacatttgagaaaggatcccacatttctagatgttcaatttcactaagcgggaatgtaacgtgtggcaattttttgtttgtgtttacttttattttagtttcagggatacatgtgcaggtttgttatataggtgaattacatgtcccggggtttggtatacagattatttcgtcacctagttaataagcgtagtacccaataggtagtttttttatcctcatcctcctcccaccctccgtcctcaaggaggccccagtgtctattgttcccttctttgtgtccatgtgtactcaatgtttagctcccacttatgagtgggaacacgtagtatttggttttctgttcctgtgttttagttcacttaggataatgccctccagctacatccatgttgctgcaaaagacatgatcttactcttttttatggctgcatagtattccatggtatatatgtaccacgttttctttatccagtccaccattgatgggcatttaatttgattccatgtctttgctattgtgaataagtactgcaatgaacatatgggtacatgtgtccctatggtagaacagtttatattcttttgggtatatacccaataataggattgctgggccaaaaggtgattctgtttcaagttctttgagaaatcaccaaactgctttccacagtggctggactaatttacattcccaccagcaggatataagtgttcccttttttccataacttcatcagcatctgttattttttgacttcaataacagccattctgactggtgtgagatggtatttcattgtggtttcgatttgtatttctctaatgattagtgacattgaacatgtggcaatattgacctgcaagatctctatgaaacttctctttacccacacttggttgcaaagatataaatgaaggagggccagtggacagacaagtgtcatttcctgattctcaaaggtagaggcatcacctacggtagagtacctgaaaatactaaataaatcatcttgttatcctaagttttataggtggcacaagttatctcattttgacccattgcagccaggtggtactaaaaagacaatgaaaaactgcttggctggatgcaagtcatttgcgtaggagcatttcagtggacaaatgaagtaaagatgctgcagaaagagcaattcaacgtgtgttcaagtatcctcagaaaacgcagtgggagattcagtacctgctctgtcacacggtgaattctcaagctcccaactcaattttcctaggaagctggattcaaaagcccataaaagaaaagtctcttgcagataaatcctatcagagccaagtactatcagctacagacatcacaagtttcccgtgatacagcctaggcagagtagtccttgtgaaggaagtgacacagaatttataccaagggaaatattagaagagtttgcccgtaactcgaaaaaatgacactgtacttggcctgaaggaaattggcaaaatgtgtaactgatgatatatttgtatgttgggttaagaatgaattcaaattttttatttctttgaattagcacataagcttccaaagatgttctattgcctggaacccacccaactctactgggataactgagccaacagggagttcctcacctctgactcccacttgctaacagtccagcagtctggctgcagggactgatcctgctttcagggcagtggtggccaatgtattgacagtcccaaggtcaaaactccttacatcctccatatgtctctgtaccacccatcatccccactcaccattgatgttcaggaaggggaaggtgtcctggatgggaacatggtgctgcgactgatccagctcatcttcctcatcttcttcatccacatcattatccttctcatcccagggagcagaccctgtggatcctacccaagatacacaagctcgcaggtgagccattcaggttgcactgccacccctgcagctgacccaccattcaagctagggactgctagcccagaggctcctcaggttcagtacacaccctcaatgtcctagctaaaaagagtgagaatcaagggaatgaacacttctctcatggaaggacctccctagattcactggagcacatatctaaattatctggctgttagtacttgttaagtatgcagttaattggagggatcaggagatattctcttagtcaaagtatcctatgaattaaacgatcagtcacccaatatgtataaagaacttattaccctgatcttgtcactattatatgtaccaaaacatcactatatacccaacgaatatgtacaattattatttgtcaattaaaaaatttttttaacagatcatgttaatttttttttacagatcatgttaattgattctcacactagcttttgaagtaaataggaaagctgagatcccatattttagagttgaagaaactgaggcttacaagaggtaaaatgacttgattcaagtcccacaagtagtaaagtgataagggccaggtttagaacgcaaaccttttaagctttaatcccttctccttcaaaactacctggcctcttgaatcccaaaagaggctacttttacagtagaactgtatacccctccactttctaatgctttaagtaaccaggttaaaaaacattcccctaagtaagcaagattttgctgagtctgcatcttttgttttctgggtccttcccagagaaaggctttcttgctttatccatcttaaactgtgtaaatcaggctgttttcaagttgactatctcttaagagtgcagcccagaatctggcatgctgcccaccttctccccagcacctggggcctcacctgggttaatgatcgagccctggggctgagggatgtcacacacttgatatatcttcactgggttcatgggcacctccttggtgccatcatacatcaggttgaattctctgctcttattgagagcacagcgcagctgggccttccatttagctgggtcagggtcatccaccccttcctggtacttccctgtctctacagcccaggcctgagaacaagaaaccacagtgagtcctatcattgcccagagccactgcaaagcatgtgcttaccctttctcatagacacaaacacacacacacacacacacacacacacacacacacacacacaacttttgcatgactgccccatcatcccaaccccgatttacagagactgcagcaggaaacactgcccttaggaccaggcaagacaggtgcctaagggaaataaagccatgtgcaaacacaatatattaaaaggaggaaccttatctcaagcactggtaccggcactcatcaagacgacaatgctctaatgaagggctgaagataaagcctgctgaaaatatgcaccaaagtgcagatggtaactctggatagcagaatttcaagtaactttttttctttgcttattcatttttgacatgagttgcttatacgacaataggtaagacaaagagggatggcagaggatatgaagagtttggcctcctgtgttccctcctgtcagtcttcaatctaatacataaataaagaattgtaacctgggtgcaggggctcatgcctgtaatcccagcactttgggaggccaagccgggtggatcacgaggtcaggagtttgagaccagcctgaccaacgcggagaaactctgtctctactaaaaatacaaaattagccgggcatggtggtgcatgcctattatcccagctactcgggaggctgaggcaggagaatcacttgaacccgggaggtggagattgtagtgagccaagatcgtgccattgcacccgagcctgggcaacaagagtaaaacttcatctcaaaaaaaaaaaaaaaaaaaaaaaaaagaattgtagaaaccaagtgcctttaggagggaaggaaacacactgggggttcagcttgtccctctggctgagggcctcaagtcctaaaaaatccacaccccttaccttaccctatcccctcaaacttctgcttcattagaaacatcatgctgtcaaccacaccagtggctggcagcacggactaaaaccacttcgactccttctctctggttttcaaatatggaaactcacagcactttccccagacaagaagaagttagcctccctaatgaggaaaggaaaaatctaagccgctcaagtcatagaccaaggtgctcaggagcaaagcagggagtagacacctggccctactttcagctctaacaggcattcttgtttctgcaatgggatagccactctcccccattgctaacaagttctctgatctctttgtgcaggagtacaacttgttctgatgccgaaaaagtaggtaccattagcagacagctcaagacaggaagcacacaccaacgttttcaagccaacagtgtatatgatttgtccaaacccaatcccttcctctgattctgatcataggcttcttcctcaagctgaaattgaatttttctgccccatcctttgagagctctgatctccttcagtcgccccctgaagaacctcacaggcatgaggaagtttcctcaaaagctaatctaaatcctcctcctccaattcagatcacttcctcttaccatcttttcagatttgggtccctccatttgattgtggtatggaatgaagaagtttgacaacattctgctgccccaggtggctgagcagacactagggggcctaactgctgctccattctatccaaccccctacgggagatttcaacttcactggtcgctggtatctggaaggcctatctccaattacctggcagtacctggctgctgcctccccaaattttcccttccatttgtttgatcctctgtgtgcccacgctaactctggccccacccagctgactcgggctatgaagactttggcagagctctgcacatttctgtggttccctaaatccctgctcctccatggagagcagccagaccaacccagaaccagagccccagccttcctgctcaccacacagccatccccaggacccacccagattgcactgggcacccaaggctgatgcagtgaagagccgtatcgtttaagactggaactttagaatcaagaaaggaggccaggcgcggtggctcatgcctgtaatcccagcactttgggaggctgaggtgggtggatcatgaggtcaagagattgagaccatcctggccaacgtggtgaaaccccgtctctactaaaaatacaaaaattatctgggcatggtggtgcacacctgtaatcccagctacttgggaggctgaggcaggagaatcgcttgaacccgggaggcggagtttgcagtgagccaagatcgcgccactgcactccagtctgggtgacagagcaagactctgtctcaaaaaaaaaaaaaaaaaaaaaaagaatcaagaaaggagagcctaggaggaaccatgtggcaatcattgtgatttataaacatcacttgttcaaacccattctgagtcttgctagcaagagattctgatcactgtgcaggtccttatttctctttctaaagaggaaataatctctgcatttttatagtgctttacaaatccctttccatactttatttcacttgattctcacaggcaagactaatttcatccccattttaccaaagggagagctgaagcccagagaggttaacttgctcagggctacacatgcagttgacggtagtagaatttgaggccaggtcttccagttcttgatcagaaagggcagtataatggggggtgggatgcagacagaaagtcatgggttcaaatcctacccccaccacttactggctgtgtgactttggcaagttattcagcccctctaagacttggcttctgtatcaacaacatgaaggtaatacctcccttacagggttgtcacgagaattaaaagagataatggacacagacacccatttaatgttagtgccccagctgcatattctgctaaaggccatcagagcttggtatctgtgaaagcaccctccccctgcactctgcaaacagatgcacagatataactaaaacaaagccacctccccacagcccaattttcctcaagccccaagcatgcaagcccaaagcatcactctcatgagtagggctttcaggaaatagcctcttccccagggccagccactgtcagacacttgaacagcaaatccagtttcagaccatggccacaagaggccaaatgggccaagatgggcccgtgcccttctcaatgccaactccaataattggtgctggtttataggtactaaccttatcaacttttatattgttatttaaaatctaaattaagatttagattttctaaataccttctaagtaccttcaggtcaatattctctctgcctgtcctctctacacctgacataactgagttgggtgggaaacatcctaaggatggctttcttttgaaccctgcgcttacattttctgccctttcccaacccaatttcagcaaggacccaaagcatgaatcttgagagacccacagtagagactgtatttcacttgtgacttctagcttatactcaaagaagaaaagggcaaacaaaactaacttctcagtgtcttgggatgcaggaactaaagctactcatgagatggaagtgaccaagaaagaagctggtgtggagcagagacgtagcctccagggtttcaaaccatgtgaaaacctttcccacaacaagcctgtccacctacttctgtcttaagtcaagctttggtttcacttaaattttgtaaaatgctatgtgattaaatcttgttttcagttaaataaaatgactgtcatatcagtgctatttcttatttttaaaaccatttaaaaaattaaaacttgtaattaaatcacctttgatttttaagccccagttatagatggggcgaaatattttaactcaaaagaaaagcttgccaggtgcagtggcttatgcctgtaatctgaacactctgggaggctaaggagggaggatcacttgaccccaggagttcaagaccagcctgggcaacatggtgaaaccccgtctctacagaaaaaatacaaaaattagccaggcgtggtggtgtgtgcttatagttccagctacgtgggaggttgaggcgggaggatcgcttgagcctaggaggtcagggctgcagtgagctatgatcatgccacttgcactccagcctggttgacagagcaagaccatatcccacaaaaaaagaaaaagaaagaaaaacttgctgagagccctctataccaatcacataggctatactgcgtgcctgctaacacctgatagttctgtcctggtctgagtatccattcccaggcccaagcaactctctgcatagcaagagctctgagttattgaggaggaagagtcaactgctgaccctcgctagcttttgaaacaaacacatcactacaatcactaatgagagttttagccaaccccagctggtatcctttgggatgtgagtgagtaccttcaatgagtgggaaagaataaacggcttcaaccattgcagacatgcccccaaaagaggaattactatgcctgctgagtttgggcacccccatcataagcattctctctgtttcaccagagttttagatctagtgtattccccatgccaaaaaaaaaaaaaaaaaaaaatccagaaaggtctgatggtagaagaagtcctttaccttaaaaatggtattttcctcttcttgttgagggctatgccgggtggcatgtttccagggaatctggaagcgtttagagtccctgtgtagccagatgagcccagggtagaggccactatccacctgggccaccagccagggctttagccggactctgcgggggtggagggccatgatctgggggggtcagagggagaaatgggaagagcagaagaattaggccagccactgggaacccttcccagccacctttcccatctactagagctacagtttcactagattacagcaaagaaactaaatatgggaataagctgtgccaggtgggaaagaaaagaggttaaaaggtcctttttattctgattccaaagccatttacacttcatgctctagccaaatcagacttatcagctaagtagatcacatttcttctatttaaatcctgaagcagaaaaataaaaaggtgatgtcatcctgctggaacacagtccttcctgaagcaccaagggctttggaagagaaggaaaattgctcttttcaatctcatctcaggagagggaagaaaaaagttatggaaacagcaacaactatataagtgagaaggtgacacatgttctctttttaaacaagacaactaaaggtgaatgggaatattttagaaataaatgacaccaccatgatgagggagaagtagataaggggtagatcctggactccagagtcctcacttacatggaagagcaggcagtgtgtccacagggatctgaagagtcggcttgtctttcccttgaccgctcaaagattctgtatggagaaaaggaggggtctcagctggctatccatacaacaatccagtgtctgggagaaggcttgggaacactggcgacaaaggctgagaacacgtctccactactgagtctggtaaagctcagaagccctagaataaccaaatactaaagtactaagagtacttagagtactaaaagcagtcatgagacaagctttgcatggctaggacagcctcctcccttgggtctgtttatctcccagtgaaggctggagtgaaccaattggttgcaggagccagcatgggtaaagtctgcaattgattcttgtaaaaatacatgggcatagcagataacattcaagagcagctggcactcacagcagaaaacaaaagccttcccagattgggtgactgataaaaaaacagtcactggagaattgtttgtctgagatgttgtgtttggattttttggtgttcttattttgtttttacttaagatgagaatgagatgcctggaaaaagaacactcattcaacaaatatttgttcatcagctactgtgtgccaagcacggtgttagttactaaacactgacgctccatgttccttcttgagaaactccacactggaacttctcaagccccacaatggcctgagaaggaggggaagataaataggtcaccttcatacccagaaagatccctacctggaccacagttctgaaaccaaacaaccttacagcaaagcagctaaatatgggaataaactgtgccaggtgggaaagaaaagaggttaaaagggtcagctgaaggctcctactcagaagagcttagctgacggggtggcccataacaccacttctctccccagccagactcccaacaaatgtgaaaaacccaaacccaactcagcgtctggcactttaagagcaaggcaagacctgctctcacctgagctttctgacccaattaccaagtcctgcaactgaaaccttccccctgggagcatagtgggtaggtcaggttggcacgcagtgttcaagtacccccatgtagttggccttgaattacggtgttttgtagggcagcatgtgaaaccatcaaaccatggagtgcattataagccttataaggaggaggggatgcatattctctcaacggctagttctaccttctgctccccagtcctatcactactgaaagggggatggagcaagagaaggaaaaagaggatagggaaataggcaccaaaccagtcaatctagtaaagagcttttgagaatttccattgcaatactggtaagtgctgtgtttgggcctgtcagacattaaaatccaactcttgactgatagtggactggaagaaaagtccaaaaggacttattgtagttgatccaaatcccaccatgcaaaaattaaggcaatcaggccaagaccaggagctgcacctgatgatgggaaaggagaagcagccacccacagaaatcagtgattaagatctagagccctgggttctcagtgttctcctaagatgggactacacaagagcagccttgcctcagccccatggaaggagccccagcctgccctcctccaagcccatgccctgcctctctcactgtaaaccctctccaccttctgaaagtcagccaagatctcccccactcaccacccagtaactacaagtctaaaaacaggcagagatggaacaattgaaaacccaaatggccaagacagaaacattcattacgtcacaaccacaggctgcaatattaagtagccattaacaacaggtgtcagaatttgtattatactcaaggaaatgtttacaatatgaagttgtgggggcagggggaaacagcatacaacttgactgtgtagcactatctccatcttgtaacacagcatatacttgcatacatgtgcacatacacacagaactgaaaaaaggaaataaatacaacaatgcaacaaaatatttgtaatggttatctagtgatgcaactatgggtgctttttacattctcccatatacattatatatgattcatattttcctacaatgatatgtttcaatttataatttaaaaaactacaagtaattttttcttaacctcaggacaataagacatttcttatgaaggatggtaacaacaatcctttgtatctgtgtaggctttacaatttttacatgaacctttacctaacatgtctgatttcatcctcataaacctgaatgtgatattactatccccattttacatctgggctgaggtgctttatttcctaagtcacagtgttctgtaccaaaccctgccactgcaccttgtcttccatgtccctctcatcttctgcgcaccaagaaagtaaactaaaaacatcaacaaagatcccagcagcatagagggccaataaagtgattgaggtggagactgcataacatccactctcaaacacacctaaatcagagttctctttctaaacactcttgccacccaaatcccaacgcctgaagaaccaccttagcctagttgaactcatcttggtatctctagctgccatcacagcaaaatgtaaggcctgtgtctctaacaggtacttaaacagccaaaggacaatgatgctaacctatctattcccctcacagtgagcatagaggagggacactttcagcctcctccgagcataactgtcctctcccatacccctattctagggagcaggtcctccataaacaccctcattgccacctccatagctcctccccagactagtttccaggggcactgccacacaaaagccgagatttggccgtcagtggttttgctcaggttaaaacacacgccatttctcgcagacaattcttagcagtcccagctcttccctttctcctgaaagaaatgaaatgccatcgtctaagttccgttcctcaggcttccctgtttagccctgcttaggggtaaactgcaggcctctagtcaaaatgcccacacccttcccttctgctggatggaagctgggggatggcgaatgggagttacaaggtattgagtgccactgtcatacatcatacacacgtctcatcctaaaccacactcctgggtcaacaccagctttcaccaatcccacccaagcgccttcctctctctatccatctcttttccctgacttccactcttgacatccaccaagagaacaggttggaacaggatgacccctttaccacaaagcaggctccctgtaaagagtgacacctcaggcctcctttccaagtcaggcctgggagactttccccattctccacaccaccctccagccccttcgggcaaagagggcccacccccagagcaaccacaccccagcgccaccctccccagcacctagctccgctccttggaaatccaaggttgtctcccaggcccagggcgaagggcctaactgtgccaaacagactcagggagggaagacaaaccgccaatgctccaaagctcctggccaccctcactccagtttcccaaaacgcccactaggatcaaggacctgcggacctgggaagtcccctctctgggacacaggggccagccgcaagttggtaagactgaagggggcgcggtgctttagctctaccggatagtggggttgttgacggccgagagcagtgccctccgcttcggcggtgggggtagggagagtagacacaagtgtagattcgagaggggcctagcgctacagaactgaggccgccccaaagctatctggaaaagggcgacaggcacccagccccagtgggtacccaccccaaacacacagatgcccccaagcaagttctctcaccccctacaaactccggggatgggtcctaccccacccacgggggagcctctcctccctcaagctggtccccagaagttggcgtacccacctttgctcaatctgtccaccagaagcggacgtccctccgaaccaagtccgcagcgaagatcacccgtcgctaccacgctcctcgacgtcttagccaaggggcgcctggctctacccaagtagggactgcaggttcctctccccgtcccgcaccagcccttacctgcccagcccaggtgcgccgagctcacgtcagcgcctcgccccaggacgccgcagccttcgcatccgcccggccacgcctcccaggtgtggccacgccccccggcgttcgggattggcgagttgcaagaaatatgacactccgcgtttctgggctgcccggcccagcggcgtccgtccagcgtcccaccctactcctccgcttctaactccggctaagaaagtcccagattcaggcctagccttacggctcagggctggtggtcctgggaactggaagcgactgggagttcagatctaagtcgagagggtgcctccctccttcacggcccataattaccctgcagtatgcagacagttaagcacaaataagggttttgagattctgggttggccctactactcgtgggcctgtgtaagtggagttgcacatgaagaagagaaccaggacacttggtcctgtctgggagaagccataggctttcaggactagaattctacctttactctgcctcttacccgtgtgaccctgggtaagttacttagcttcttggcttcttggtttcagtttcctcatctcttcaatgagaataataattccttccttcttttttgttgttgtttgcttttttctctttcttttttcttcctttttttttttttttttttttggagatggggtcttgctattaagttacacagtctggtctgcaacacctgggctcaagggatccgcctcagcctcgcaaagtgctgggattacaggcactggcacccagttcaattcctttttttttttttttttttttttttaggcagggtctggctctgtcatccaggctagaatgcagtggcacaatcatagctcaacctcctgggctcaagcaattatcccacctcaccctcccaagtaactggaaatataggcatgggtcaccatgcccggctaattttttttttttttttttagagacagggtctgactatgttgcccagactggagttcctgcttcctctgatcactatcgtgtaatgagtaaaagcatagcctctggagccaactattggggtttagaccccaactccatcagttactacagacttgggaaagtttcttaagctttttaggccctggtgtcttatctgtagaaagaggttagtaatagtacctacctcaggggtattgtgggaattcaataactacatgtaaactgcttgcaacaatatttagcacttatcaagtgctttatatgtacttgcaattattattggcataaagattaaaaataccatatagacagtgcgtcagagaacaagaaggcattccttgttattacctgaaattcaagtcctgcatgtaccctaacaggtgcttgatgagattgccctcaccttcctcatctatctagaggaccggtttgcaggaggctgtgcaacagtaaatgagacttttaaaaatcccccaccctcaaccactgagctgtcgtaggtgaaatggggcatgcgcaggtcacttaggttttggtgtttaaagtaatgagtgagaaactgtggaggagtggtacaat

SEQ ID NO: 285 - DNA, 10428 bp, Homo sapiens
  source 1..10428: mol_type = genomic DNA
cattcctgggtctgtctggggtcggctccagcctggttagaagccttagtctggattcggcagattctgaatctgggaccctctgcgctagcggcttggaaccttgtcaccctcccctcccccacccctacttccacacacctgattagttgtctgtttctttaatgatcaaagacgtgggcggcggcgggatgaggtcttggttcccggctccacagccctccctaactgtcattattaacgttataaacattagacccgcttctgcgcgccggacggcgccggacgaggtgcgcgcagtcttctagctgagctcggaggcagatccagaagtcgcggctcccaccccaggcctcggcggactctgcctggggcgactcgggctccagccctgcccgggcgggcactgggctctccagggtcgaaggcaggggtaaggggcgtctttcccccagggcagcctccgggaacaaaagcatttgctgtagagtgagctagagcctccgggcccgcgggagtcagctcccgcccaggggtggtcaccgcgtccttaaccaccccaggagccccgtctccctgccgaactccttggcttctgcaaccctgtcaagacagcaaggaaagggggtcttccctggtcctcgggccccgaagtttcggggttgcttataggacgggttcctgcagtccagggaagctctgggcagatagcgagcccattctcccttccattacccagattctgcctccctgcggaaggcaaaaaagaaagaaagaaaataggtaaaaaccggcggagggccttgagcctccccgcctggcgcccctcactcagtcccgaaaagtcccctggacacgccatgccggaccggactcagctcccgctgctgggcccctgcctccaaatatccttcccaggcacaggctcccaagaccgccccctcagggttcccaacacccggacaactgcccaagacgccgctccccgcccccacccccaccttgttcggcagacaaagaagggtgtgctggccccgccgtctgcctccttctcccgaccccacaaggcctagaaacctcagggactcaccccgggctagggacccaatcctggctgtcccaccacaggatccccggcagggacgggtcacagtgctctcacccctcgaccattttcgaagacaccttccctgaaaggcgccttgcgccctccccatgggtcggcggggggggactccaggcccgagcaggcggtgtgaagttctgtgttctgaactggggctgagcaagatgcgatggtctcagcccgctgggccgcccgtagcgacggcaggagtaggggagagggagggacgcttggagtgtgagcgcaccagtctgttcatatttaatttacaaagcagcctcggaaccccgggccgggtggtctctttagacgctgcgctcttagcctgtctctcttccccaccccctcccctagctcattaagatgctcaacactcaaatcggggtattgatctccacggaagccccaaaccctcgccatcgagagacccccatggcccggggtgatggctgtggggcttggtgctcccagagagctcagtggctacagaatgggtggggattctgcgtgtctcccggagcctgaacccctttcctggttatggccggtagctgtctccagggctaacgtgggcagcgcaggggggcggaaaccgggttttagccaaatgcctcgacatcgccgcgcctccgcctcctcgtcgctgaaagaaatgtcggggtttcatcagagctagggagcgacagtcgggaacagcgagtctgccgaagccggctgttgtgtgagggtgtgagacggcggggcggtgaggggccaccgcggcttgggggatagtgcgtgtggggttgaccgtgtgtctgcttgagaggctgtgaagatatggggggcagatatgggagaaatgctcgggcctgaagtccccagcccaccgtgctcaagagtagcggacgttttgccaccatccttgtctgtgctactgtctgctgcagcttccgtgccccgttctcctggagcaggcaagacctggagtgaggtgcttgggtgcgctcgagagagcttccccctgctccacctgtcccgcggtgcgcgcaggccaacgcgtcgggcagtgggcttcaagcgctggtttagccacaaaagaccagaagtaaagagttccggcttaagaggctgggcagggctgcggtgggctggggaggggggtgtcccttcccagcacgccctgcagggctgtgcgttctggtgtcgggttagactagcaggcggggcgggggggttggggcggcggggcgggggagactagggcttatatcagcccagatccaggcaaaaatggtagggagggtgcggcgctctgctaacactatcaattatgcatcatgttgaacgtggcttcggggaggaggcggctagcagcggggggtgcgggagggaagggtccgcgcgagctcggctgcgcgcagctcagcgggtcccgctcgaagtctgtcggtgccaccgcctgcatttgcaaaaagagtttaaaggcaaagacacgccttccccccccacttcagccgcgcgcctttccttcccccaaattcctcaaagatggtttgtctcacgtgttgcagggcgtaaaagcggcttgcattcaattagcagcgaagctcgcgggcgctggcgggacaggcgcgtgagggtgagttcgcgtgaatgtgtgtatgcgtgtgcgagaggagaacggtaagtgtcccgggtgcaggtgtgcccgtgaaaatgcgtgtgaatgtagcaggggctgaacacattgatgcgattattacctgaccatggatgattgtaaactgtgaaggtcggctatggggagggtgtgagggactgtgtgcgcgaatgtgtttgaacgtggggtgggggaggtggtgtgatcagggacagtaacaatgccagcggctgtgtaaatgtgggggtacgtgggttatgggggtgcagtaggctgcgaagagcccagccaggacagtgggcgtgggatgccccttatgaccgacgtgtcttggccttggggagggtctccgtggctttaacaaaagtagaccaagcaggaggcgggagaggctatgcgcgtccccgccaggcccgggagtgcgcaaggactttctccaacctgcagccagagaggtgggggaaacggacgcaaaaggaaaaattgaagtggtactttggggccaccaagtccccaaacttacctgtccctttctttgccccccgccccccgttttccccacagccacaacacatgcgtgtatcttgcttgggctatcttccctgctctgccacgccgggtctggagaaggggtttcagccccaggacatttactgagagtcggcgaatattgggtaagcaatgggggccaccccacaaccttgacccaggtggggttaggtccagcctagggcacctgatggggtgcggggctggtgggggtgctgtctggcaggaaccgggaagggagggaagggaccctcccagaagagcaaaggcagagtgaaggagcaggttcccaaagacaagttgtgggaggggctctgccaaacctgacaggcgctccaaatgggggcagggagtctgtgcaagttcgtttgtgtgaccgggcttaaggtgttatggggagggggtccttaggcaccgcagagctgtggagaaaggcgcagaatctttcatcttctccagcttcattagctagtggcagccccatgacctgttggctgaggacgcctctgcccaatgggagccgcctgagggacctgagaggaagctctagtgaccgctttcccaacacacctggtccaaacatgggggagaacctccttccccgtaaggaaggttggcagagcagcccttcttctcccctcacaggagctgcagccccgggcaggtgactttggccttagatgcagtagggcatggggatgggcttccccagatcccacatctcaagtcgtgcagtgcaggtcctcctattgcttctctgctgggtttcggtcacagtggagggctgtatgcacacacaggcacatgcctgtgttcttgtgggtgggtcggttcgtgtgaggacttgtgtccttgtgtctgtcaattgtcacaatggacaggaaagcgctttgtaccgtggtggaaaacacgtacaaatgctggttaagagaacaatgaggtctgcagggtctattgtgtccatgtctgggtgcatatgtgtttgtgagtttaggaaatgtgttgtgagcctcctaattgagcatcaggtcctctaaacccctgcagaagttggcggtttgattatgaagccccgcgtctgtttgtattgttgtgtgcctgcatgggcgtgtgtgcgagtgctgtgcgtgggacaaaggttccagggaggacagccagtcacggacaaaaatgtccttcttgggtaggatccatttcaccaggttaaacgaaggcttagaaacacagagaggggtacgtgaggagcccgctggagatgggcgagctgcggagcccacggaggggccagctccagcgtgaaggaaggagtaggaagagaaaaaagggcgatataccgggccgctggaaaaggaaattagggccctgggagggagcatccgttgaacctcgagatttttattgaccttcacttcagagaggctcctggccatagaggaggttaccggagccctggaactagtgctaaacgggcttgcggaggcacagcttgataggggaggtaagctggggttcagtgagtcaccttctttcttcttcacctggcttccatctgcaggagccgcgatgttcccccttcgggccctgtggttggtctgggcgcttctaggagtggccggatcatgcccggagccgtgcgcctgcgtggacaagtacgctcaccagttcgcggactgcgcttacaaagagttgcgtgaggtgccggaaggactgcctgccaacgtgacgacgcttagtctgtccgcgaacaagatcactgtgctgcggcgcggggccttcgccgacgtcacacaggtcacgtcgctgtggctggcgcacaatgaggtgcgcaccgtggagccaggcgcactggccgtgctgagtcagctcaagaacctcgatctgagccacaacttcatatccagctttccgtggagcgacctgcgcaacctgagcgcgctgcagctgctcaaaatgaaccacaaccgcctgggctctctgccccgggacgcactcggtgcgctacccgacctgcgttccctgcgcatcaacaacaaccggctgcgtacgctggcgcctggcaccttcgacgcgcttagcgcgctgtcacacttgcaactctatcacaatcccttccactgcggctgcggccttgtgtggctgcaggcctgggccgcgagcacccgggtgtccttacccgagcccgactccattgcttgtgcctcgcctcccgcgctgcagggggtgccggtgtaccgcctgcccgccctgccctgtgcaccgcccagcgtgcatctgagtgccgagccaccgcttgaagcacccggcaccccactgcgcgcaggactggcgttcgtgttacactgcatcgccgacggccaccctacgcctcgcctgcaatggcaacttcagatccccggtggcaccgtagtcttagagccaccggttctgagcggggaggacgacggggttggggcggaggaaggagagggagaaggagatggggatttgctgacgcagacccaagcccaaacgccgactccagcacccgcttggccggcgcccccagccacaccgcgcttcctggccctcgcaaatggctccctgttggtgcccctcctgagtgccaaggaggcgggcgtctacacttgccgtgcacacaatgagctgggcgccaactctacgtcaatacgcgtggcggtggcagcaaccgggcccccaaaacacgcgcctggcgccgggggagaacccgacggacaggccccgacctctgagcgcaagtccacagccaagggccggggcaacagcgtcctgccttccaaacccgagggcaaaatcaaaggccaaggcctggccaaggtcagcattctcggggagaccgagacggagccggaggaggacacaagtgagggagaggaggccgaagaccagatcctcgcggacccggcggaggagcagcgctgtggcaacggggacccctctcggtacgtttctaaccacgcgttcaaccagagcgcagagctcaagccgcacgtcttcgagctgggcgtcatcgcgctggatgtggcggagcgcgaggcgcgggtgcagctgactccgctggctgcgcgctggggccctgggcccggcggggctggcggagccccgcgacccgggcggcgacccctgcgcctactctatctgtgtccagcggggggcggcgcggcagtgcagtggtcccgcgtagaggaaggcgtcaacgcctactggttccgcggcctgcggccgggtaccaactactccgtgtgcctggcgctggcgggcgaagcctgccacgtgcaagtggtgttttccaccaagaaggagctcccatcgctgctggtcatagtggcagtgagcgtattcctcctggtgctggccacagtgccccttctgggcgccgcctgctgccatctgctggctaaacacccgggcaagccctaccgtctgatcctgcggcctcaggcccctgaccctatggagaagcgcatcgccgcagacttcgacccgcgtgcttcgtacctcgagtccgagaaaagctacccggcaggcggcgaggcgggcggcgaggagccagaggacgtgcagggggagggccttgatgaagacgcggagcagggagacccaagtggggacctgcagagagaggagagcctggcggcctgctcactggtggagtcccagtccaaggccaaccaagaggagttcgaggcgggctctgagtacagcgatcggctgcccctgggcgccgaggcggtcaacatcgcccaggagattaatggcaactacaggcagacggcaggctgaacctccgcccgtccggcccgcccattcccgacctccacctagggtgcctgggagcagcagtctagggctggcaggacttatgtcccccgtccccaaccttcacctactcctcccccttactactccccaaccttgactaccagggacttctattagggagtgggccgatttcaccagtccctgctacccacggctgccattctccctgcgggctgaatccccttccccgccaagcacagtgtttatcttaccccatgcaagactccacccgcagacggtgggcgatatctatgtccctccattcccgtcgcgattatctgcgaaatccaccccgcagcccgccccaccgtgggctctggagccagaggaaacgagcgaagactttggaaacctcgcggtaacgcggtggtttcgggggccagccaaggccagtggagtgctgtggggtcccacctcgacccctcctcctccctttctttctttcctttttttttattttttaattttatttatttatttatttattttttgacggagtcttggtctgtcgccaggctggagtgcagtggcgcgatctcggctcactgcatcttccgcctcccgggttcaagcgattctcctgcctcagcctgcctagtagctgggactacaggcgcgcgccaccacgaccagctaatttcttctatttttagtagagacggggtttcaccatgttggccaggatggtctggatctcttgacctcaggtgatccatctgcctcggcctctcaaagtgctgggattacaggcgtgaggcaccgcgcccggcccctcctccctttcaatccctactcccagaagccgggattcgtggcaacccctagtttttagttccaaagcctcctgccggcagggaaccaaatccttctgtcctcccacccccaccccacttctggccagttggagtccagcccggtgcctggggcgcctttcagctccgcgctcagattttcctgttttcgttgttttcaaagacagcgacatttcgggtctggtgctaacacccccttcccagcctctgggaaaatcgagtgtgtgtgtcggggggtagggagggaatgcgttttctgtcgtctctctcctaacttaaagcgccgcaggaccgcgcgccccttggcggctgagcctgtggacttggtcgcgggccaatttcgttgtccgtgtgttgggctttccggaggtctgtgcgcccaacagcgccgctcccgcggctccacccgacccagaccctagctggaaagcgccggaggcggaggaagctgactgtggcctcccgggccgcggctctctggagggctcgcgccctagttcgcacaaagcctgctcgtgactgtgcgactgtgcgacgggatccggatggagccgagcccctccgtcctcgcgtctcggtcctcgcgtcgccccgccccacccgcccctgcttcggcgggaatcgtgtttgcccggcgtgtagtccctgacaagcgtgccctgtaggagaaaagtctgtgtcctgtgaagtgtgaccgtgtagtgtaggggggcgggcgggggggcggatgggcggggagggagggaaggggaggggcgcggcgcggcgactcggggcggggttcttttttccattttgaaagaaagcgtcggggttggggtggggggagtttcagtcctcgggatcagccctctccgcgaagcgcagcacaagcgcgggcctgggacggagtagccccccggagcccgtgcccttttctaaacgcgtctgtatgcagtcaataaaacaatcgatttgaactgggctcggtgactttttgtcaggggacagagggaggaggcctgggcgatgaaggaggaaaccgcggaaggaaggagcccccccagagcctcccgttggaatcttttgagtgatttcctgtttgcgtgaccatcctgtgatttttttgccaggtgtttgcacccagccctgctcttagtgtctccaactccagggtggggtgacaaaaaacgagggcaggctgcaagtgagtagggggaggttgcaggaaaggaaggcgggtgtctgcagaccctgaacacagggagtctgagtgtgcgtgcaagtatatttgcactcaagggtgtgcggcaccctctttcacttgagactgtctgtgtagtggggtgtggctgtatatggtgtcacactgcccagtttctgtgtctccacatcagcctttgagttccctgagaagccggtgggaagaggatgggattcatagggacaagaccgctgtggcttgcacaagagaagtcacaaataacacaaagtacagagcgggcaaatgatgtaaagcaggaaagggggagaacctggccaggccgattgcccagagcgagccggcacgtttggcctgggagccaagtgtgtgcgttgtgtgggtgggtggggagcactcagtgaatgatgcatgcacaaccgtcagggtgtgccaagggggtgcacctggggaatcagggttgaaaacacactgatttcatagtcctagaaaggggctttcttgggtgaggaacaggagagacagggggatcaagaaaggagactgtgctcctggccagcctaaaacacacgggttgggctgctgtgtgtctcagctgaatccccctaagatgggaagaggcggggaagagagatggaagaggaaagcaacagaaatgggaagcagataaagattctctctctcccctcccttcttcctgcttccaatttcttgtcctcttttgctgtctctgtgggtcttcctaattggaccagtccaggctggcaacaggcccaagttccaatgctcagggtcctaccccagcctcaggtctgtcctctggcataggtggtggctgtgacacttcttggggcctgagcccagattcccttcccagaccagcaaagctgttttctttcttttttttttatttttttatttttaaaatagatcagttttattctgctagttccataaaaacaatgtaaacacaagcgttctgtacatcttcttggtgaattcacataatgctttgttccctgatcctttaacctcctcgtcttcttccagtcattttctgtttggaccactggccacaggagtggagtggggttggggcttaggagagagcaatgtggctttttcgtatgacttgttttattgcttgccctctcagcacactcctgttactcctaacacaaagtctgagatttaagcccttaaacctgtaggtttcaccatcagctttttctttttcttttctctttttttttttttt

SEQ ID NO: 286 - DNA, 27005 bp, Homo sapiens
  source 1..27005: mol_type = genomic DNA
ggagaagaaacttagaccaggagtctgagaattagagctcagggaaagagaggctcatactagattacatctgtggcatttctgagctcaaggaatttcttccttatattgtgcatccacgggtaagaacttgtcactctctcaaaagtacaggccctacacagtgacacacccatgacaccagcccaattttcacagcccacttcccttccttatttcctcctcacaacagtggaagacattttaggtctggcccctggagtttggctgcttctacccccacctctctcccaagaaggggactcctcttaatgtatcaggtatgggatttcctccctctagaatttctggtgccttgttatgccacggctgccattcttagaaatgctagggggttctttgtctcatcctgtctcttctaccccatcagccccttttcatttgtgggttctgtgaagacattcctgactcagagcattctaagaagtcacagactggagtgtggtccagggttggtctcccaggagggatatttttaggtgatgcaggccctgctaggcagaagcctgagttaatgagaatagtcctggtgatgggggaagagggtgaggtggacctcataccctaccttcccaaatttcccataaatttgtggctatgctgccctctggtggctgaattttagtctatcctgacagggacatctttgtctccaacaaccgcaattgctctccctcttgctgcccgttaggacaggccttgaggagaaaagagaaccctgagggtccctcactttgcgagatttatcttcaaagatctgaaccctgtggcatgttggttaagaattcgggctttcccagccagataaggctgagtttcactctgttctgccactcactgtgtgactttgcacaagttatgtaacctctctgggcctcagtttctctttgtgtaaatgggataaatagtaccaacctcacagaactctgtgagaaattaaatgtgataatgtatgcaaactaacaccccctaccagcacacagtagcaatgaaaacaaagcaatacaaaaacctaactgggctttcttctaatttagttccgtggctttttcctctcaactcatttcattattctgatttagggaagcctggtaaattttctgaaccatcctcccccacctccaccttggacctccccctttgcattctgctctaatcctcaaacccaaagagaagaggttcctttcccttctcccttgggagtgttggggaccaggtctgatgggggatgagggaggggcagaggagtcaagccctgctttctctccttccatcacctctttcacctaagaagggagcctagaactagtttcacagtttctggggggtcatacttctggctcctagtggaaagaagccatgagagaaataggcatctgctttccaccaagtcgcttggttccaggatgggtttggaaagagtaacatgagatcacagattctagttctggtcagtgggggcactgggtcagatttattgcacttgcaacagagtttaaataagtcctgggtgtctggtgccaaggtgagggaagggttgggcagagagatgaggggcagcatcagtgcagctggcaggcagaacccaaattctgcaggcccaggacagtgggctcccctttctctggggaacagggagggcctgtgtctggccaggctgaggttccagatctgttgccatcatggccccttcagggtcctgggaaattcctggcttctcctaaatcagggtgaactgggcctccaggatcaggtctggagcaggcccaaatatagtcctggatctgcctggattaggtgccaatgtctgagtctgggttccagatcaactccagaccccaggctggatctggccccatttgagttctgattccccttggagctgggctctgggccctgggccagcatctatccttgtgtggcatctgtcctgagctggtcctggggcaccatgcatagttagtgttctttgttggcccaccagggtggggctgtccagagctgccaggtcttaactccccaagttccaggttcttagctgggggcttcttttggatctctggcaaggctgaggacagatctttgcaggttggagctggacaggaagtccttgtggcatgtctggcccaaagaactgtgaatggatttcctagttatctttccaagttgtttcaggaaactctccaaaatgcaaaggcttcagggaggctggggcctctgtccctggatctgagttcccccatccatgaagagggtatgtgtaaacaagggtccttcacagtgcatgggggggagggatccccagctcctcacccccctggctctggcccttcaagtatgtctctgggctggggagaggagcttctccctggccgtcagcaccttcaagaagtacccagacccctccttttcagtagaatgagggtggggggactggttcttcaggaatgggagtctgaaattgggaggactcaggcatcagaggtggctggaggcttgagctgagctttttccatggcggtgccatatgggagggagcgtttgaagaatccaagctgataaaggggaaaagagggagagtttaggtactatggctgccatttctccacagctcttattccaagaagtaataaggaggactctagtgcctccaacctctacatcctgcaaaagtggcctctgaattcaggctaggactacccctctaagttgtgcaatggacccaggaggaccaaacttgggggtgattttgtatggggggtatcttttaccagtgcctttaaaattccccagttaagccagaaatggcagataggtttgaactcaaatgccaagtctgattgcttagtagtggctgcttctgtttgtttgtttgtttttgagacagggtctcactctgttgaccagcctggagtgcagtggcatgatcatggctcactgtagcctcaaactcctgggctcaagcgatcctcccacctcagcctccagagtagctgggactataggcacgcaccaccaaacctggctaatctttgtgttttttttgtagagacaaggtcctagtgtgttacccaggctggtcttgaattcctgggctcaagctgtcttcccaccctggcctcccaaaatgttgggattacaggtgtgagccaccacacctggccatggctgcctcttgagagagattctgaagccacttctaggagatgatcagtagccatttctaggttagtgatggctgccatggatttttggagaaattgacagcacaaatgccacgtatttgtcatctttgggttccaatgattttgcaagtataggcaaacttatcatcttgagtcaagaggaccctttctaagctaggggctatagaatgaagggggggatcttataggaagggttaggatgggatgcatgtagccaggacagaggtgggggcacatggctggtgaactggtctagaggtagatacttgggactgtgccaggtcaagggcagagcctgatgagagggtggccaagtcacaagcaggatgtggctgaccttgtagaggatgtagatgagtagacctaggagcaggaggccaaacaggatggctaggatgatgatccacagtgggacgccatagctgccttctgccttggtccattgcacagctgtggccacctggggagcaagttgggtgaagtcaatgaaagctcagaagttctttctaccctatacttggcccccacttgtcattggatctgcagagcccagtgggctcccctttctctggggaacagggagggcctgtgtctggccaggctgaggttccagatctgttgccatcatggccccttcagggtcctgggaaattcctggcttctcctaaatcagggtgaactgggcctccaggatcaggtctggagcaggcccaaatatagtcctggatctgcctggattaggtgccaatgtctgagtctgggttccagatcaactccacctcttattttgaactaacagcattctgaacttaaaaattgaagttcctaaaatgtacaatattgtctcttactttcgggctttcatatcatatccatttttttttttttttgacagagtctcactctgtcactcaggctggagtgcagtggtgtgatctcagcttactacaacctctgcatcctggtctcaagcgatcctcctgcctcagcctcccgagtagctgggaccacagatatgcgccaccacatctggctaatttttgtattttttgtagagacaggatctcactatgttgcccaggttgatcttgaacttctgagctcaagcaatccacttgccttggccttccaaagtgctgggattacaggtgtgagccactgcgctcagcctcatatctgttattcacctctccccaggatatccctttcctgaatggctagcctggttagttcctatttattcttcaggtctcagcttgaacatcacttcttccaggaagccttccctgacccagttagactgggttcaggtgttcctattatgtgttttcataaatatcaccacacttggaacactgtgttgttccacgagactgtgaacaccaggagcaaagataccatgttgatcttgcttaccactctgtctctggcatctgcacagtgcttggcacatagtacattctcaacagttgttaacaataccaaggccagccctcacccaagtcccagccctgttccagcactctgagccctgtattccctcatccagtcctctggccctagactcacctgacgctctttttggggcagctgccgaggcaggattcggtagggcatcttcagggctttgtacacagcctcacactgcaggctaaatggctggtgctcccgctgtgggtaggggaaagttggttagcacatcctctcttgggatccagaggacatagggttccccatcgtctggctggggttgtgatctttccctattttgggctcattcttcctgagtctctctctctctctctctcttttttttttttttttttttttgagactaggtctcactctgtcccccaggctggagtgcagtggtgtgggcttaggtcactgcaacctccacctcctgggctcaagcaatcctcctgcctcagcctcccaagtagctgagactacaggcatgtgccatcatgcccagctaatttttgttttgttttgtttttgtagaagtggagttttgccatgttgcccaggctggtctcaaacttctgggctcaagggatccgccaaccttggcctcccaaagtgctgggattactggtgtgagccactgtgcctggcccgtgagcttctcttgatgttccttatatgagataataaatgtgtaactgaataattgtaacttgataatatataattagatgactacgtgttcaataaaaatttttttaaaattattaatgtgctttgacaccaggacagtgcctagcctgcagtgtgtgctcaagaagtgactgctctttactattcctacatgtgtttacctctccactatggattcatcttccatcttactgtttttctatcattctttgcacactggtctccctccagccctccctcctctgaatgggccaggaaagggaagctgctgctcccactgtggccactagatggcgccaaggacatacagcctggtctagacaagggcaaggaaggggagctggagtgctgggtcccattcaccaaaggagaggtggctactgcagtggagaaaggggtgggtcagtctaagcaggcccaaaggtcaggggtcagggctgaggtaaggctccctcacctgcaagaaagtcttggcccagactcggaaatgcaactgcagactttggctctcttgttggtgcaggggcccgagctcacagcgcagcctgaaacactcagcctccgggcatttctaggaagaaagaagcttgaacctggtgttctgcccttgtgatggccctgagaaccccagagtactcaacactttggtccacacctcattccctgcctgacttaccaggatctgaggtcccgaggaagcagagctgcggcttggagcttcccgtttttgctggtggtgcagggaaccctcgggatccaactataaaagaaagtgttgggcccctttcccatctcattacagcttctaagtcagcttgcacctgggttccagagcagcttcaacctattctttcatctatctctttattgattcatccaactgtccacctcctatgcgcaaggcactgagctcagggttaaaatatggaaatgaggaaaacttggttcttggagatcacactggaggagatgcttaagtaaataattaggtctgtgttcctgtttttgcactggatgttcccttggtttggaatgctcatccctgagtcttatagacaggttcaaccttatctttcaggcctcagttcagctgtgacgtcttcaagaggtttttctatgatccaatttaaatagtgtccctacagcttattaactcttcacttcatcacctttcaatccctgttaatttttctccttctctttttcttttctatgtctatcacccttcactagaatgtaagttccatgaacgtggagaccttgtcagttctgtttggtgcaatatttcctgggcctaacagtgttcagtacagtcacttatttaattagatgttaatgagtaaatgaactataaaacaggcattcgggcccagaggaaaaggtttgaagaaggcttcctagaggaggtggcacataactgggccctaggggtatgccgggaaacaaagaagggatagttcaggcagaaagaaacacagtggatgaaagtcctttttcctccagaggattttgaggtaactttgggccttgtgaccctcaaccctagctataggcacatcctcattgcctcttgcaggcccccagcaaccttccccaacccctcagccttggtcctctgaatctgctcctcttccccatgccagtgttcaggatctcacctccaggccctttgggttaatggggtgattggtggtgcagttgagtcccgtaactctggtcacatataggagctgctgaccttccagagcctggggacagctgagttccagcacaccctggctaatggagctggggccttggttgatgagctgaggagggaagagcacaatcatcatgagaaggaagggaatgcttctgccccattgagaccctggatcaccatggctccactataccctgctgtcaggctcctatctcagagatgaagcagggaagcaatgggcagaggtgaaatcctctctagccaacacttttggagggggctccatctttctttccaagccactcaattggcctgtctctcctctggctgtttctcacaggactctgcctcatgcctttgcatatcacttactcctccctcctctctttctctcagtccctcacatgggttccagccatctgtcactcatattagctcctcctttcccatcattcattctggccctgccccttccccccttacctcatagacatggtggacagcaggtcccaggtcctcctccttctgaggctggtctcggggatgccagtcgcttactgggaatagcactgcctcaggcttggagacactaaggaggagggtggtttagaggagggtggaaggaaccccatatgcatccttccctagaagtctgtgtcccctctcagaaagaccccattttgcctggcactgacccgttcagggtgacctgggcctgagcctccacggagagccgaaaggaaaccacgtcgctttgcgagttgttgagattcttgctgtgggatggaggcaagactgaggtgctggagtgcagccagtgagaatggcgcccagccctcccttccgtccccagctcagccccagcctagacacactcactccctacctgaggatctggaagtcaaactggatggttttcttagtgtcccggagatgagggactgtaaaccgaaggccaccccacagctggggacagaaaaagaggaaaagagggcagttagactgtgtatttcaccctccctccgcacctcacagctgtgctctcggctggctggttaccgccctcaggtctgctctccctctgtcccatcctctttcatcccaaacttacactggctcctgccttcatggggttgcccaggtcacacaccagcaggcggctctggttcacggcaaagtagtcacagctcaggctggagaagttctggagatggggtgggcactggtcaggttttggtgtcccctctagaggggtatcctcccaaatcccactcgagagtctcatctcacccctgggtgtctgacgagtcctgagtactcagcctctggaggggcggtgacccgaagctcagcctcataggcgccaccctcacccacattctgggcatggaaagtgaggttcagggcattcttgtcacccaggtacacatggttctgctccctggaagggacacagagggtaagggacattggtgaattaatcctcaaaccaggacaaaggaccattataagagtagtaatacgaggccgggtgtggtggctcacacctgtaatcccagcactttgggaggctgaggcgggtggatcacgaggtcaggagttcaagacaagcctggccaagatgatgaaaccctgtctctactaaaaataataataaaaaaattagcccggcatggtggcaggcacctgtaatcccagctacttgggacgctgaggcagagaatcgcttgaacctgggaggcggaggttgcagtgagccgagattgcgccactgcactccagcctgggtgacaagggcatgactccgtctcaaaaaaaaaaaaagagtaataataaagtaacaatagacactgcttactgagttctaactctatggcaggcactaggctagattttttatgtagattatttcatttaatctttccaaaaagtctgagaaataaatgctactattcccactatacagacaaaggagttaaagctcagagcagctcagcaacttcccaaggcgacacagctagtatgtccctagctgattttttcaggtgccaggtgcacctggagctccctagcttaccgtcagccctacttacccaaacacttccagctgcaggtcaggcacacagatgttgtcttctccacagtccagcaagatctgagcctggggagcagggcagccttgagaggggaagtttagacccattcctgggctgtaggctcttctctttccatggccctgcccccccaatacccaggcctctgtcttcccaggtcccttctccctgccctgtcctcaccttgtcctctatccggctcttgctctgataatgtagggctggcctgaggccgtggctgtccactggggcttgggggtccaaggagaagttgagagcgatgtgaatcggcgagagtttgtctcgaaattctgactcgttctggggccagaggagagagttcacggagtcaggggactctggagacttagtggccctgctcctcagcctctctcatctccctttgtctgcttagggcccaattccgaccatcctcattgtttcagaggccctggcagcctgcttcccagctcctctgacagaaggtctccctttctcagcccctacaagagtcccaagcccttcactggagtcccccagtctttttcccttcaggaggtgccctcagttctgtgtggccaccctccctggccagtccacaccccgccctctgggccataccctgaggtagatcttcatctctctgcaatcctctcgagccccattctggatgagcagggtctgggtcagggttgcctgcctggaggccaggaacagtgcccgccgtacccctcccttctgcttctgccagtccagctgaagttccactgtgaaacctgaagccagggacatataaagggaaactgcctgtctttcctcatcttttcagagagaagaaatgtccccaggtccccagtcccttcattctctgtcctagggcctgagagatccaggcagtctccctcaccaatggagtcagcaacgtgttttccagaagcattgaggcagaagctaaggttgatgctggagagagaccaagaagaaagctggtgaatccaactggaacagacatcctatcctctacctatctcccagccagacccagactaggacaccaccattttcccctttttaaggcagacttggtgcccctgcccactcccaggctcaggtctctgcaatttcctgggcaccagctcaccaggccacagggttcccctctaagctgcagctccgctcctctgggttgaacatggcggggaagatggtgagggaggcactagcggacacgatggggcggcccctgccaagagtgaatgtggggtcaatagaattaggactcctctgtaacctggacacaggaaactgatgcccaagcgccagaatgtgtgtcctctgcattgattttcccaacctcagctctgttgagaaatttccagttccagtccacccaggttgtcccctcatctccctttggagctcatacctgtataccacagccttgtccacaccaaaggaccccacaatcagatctgtaagaagtcaagaaatcacctcttacagcaagccccagatcaggatcctttcttcctaacccctcctggtttcaacgctcagggaggttgaagtgagaagacagcgccctctgttggaattagccagaactgcacccaggaacttaaggaaaggtgcagaagagagagtaggggtcagtgaccagggaattttaaggtgaaaaggggcctcaggcacaactcaccaggatatccattgccatccaggtctcggcctcctcgaagggcagagccaaagaagtctggggtgtggctggctgcccacaggggctgcagaacctgggaaggcttagagcccagccctcctgggcccccaggaaatacaaacactactccctgctgggtctccccaccaaagggagccccgatggccacatctggaagacacagaacacacactagtcagcaggccaggaatccatgggctctaatctctactaccagaccccaggacctaggatcctattttttcccatctgtcagtccctatattctaatcttcaaatcccaagacccagacagtgggattttaacccctcgggaagtcgtggaggtctgggtatcttagctgacagatgccctctccccaaatcccttctgacttgggcccctgcctcctctttcactctctgagcccatggtactcaccattgtagccatcctggtccaggtcccccaggggggtcaaggagctgccaaatcggccaaactcatcatggccagtgagggtaagggtgggcgtgggctctatgccggctgggtgctgcaggtagacgtagaccctgcccacctcctgaggccgcccgtcaggggtccgatccatgagcaggggtgcccccaccagcaagtcatccagcctgaggggaagggcaaacccaggcatctcgataccctgtcttgccaccccaccccaatcctagtgctagaaatcccggacactctgaattccatcacgtcagaagacctgaggtctctgatcatcagctctcagctctttccttgtccctgagcaaggggaatgcaggtatgagcgagagtctagagaaaaagccctggagaaactctccttgcattttctgtcccattcccactcttccctcttggttctgggagggtatcacagtgcgctcatttcccaccactcacccatccccattgacgtctgtggcggccactgcatagccaaagtaggaggccatctggggaggacaaaggggcagcgctgggtcagaactagaaggttcaatccacaggatcaagaggggctgggaagttgggctgacattattaggtcagggctggggcttcgttgacagaggccaagctggggtggggttgaggggtatccttacctgttcccctgagaagttgtagagggatcgaatgtctgagccattaaggatggtgacctgggagatgaagagataggcccattggtcctggactcccagaatatcccatggttaaagaacagatgtgtacaggacacccaggggcaggcattccttagagacgcagaccactgtccctagctccctcttcagctttgccctcatattcccacctctatgccaggtagttccaccctatgtctgcttcactatttttctccctatcaatcaccaaccactgacagattttgtatttatctgttcgttgtccctctctacccactagaatgtaagatcaataggggcaggaacttgattttgttctttgctttctcctcagaacctaaagtcatgcttggtgagtagtaggcactcaataataattatgactgaatgtgtgctggtgcctcaaacccatcacgttcaaaacctaagtcatcctcatcctccagtcccccgaaccacaaacaccatttctcccctatattcccttagtgactggccccaccaggcctcttgaatcctggtgtgagccctttcccaggactgctggacagatgtcttgacaatgtccctgcctccagctctcccagcagatctaggaggctacctctggcttggaaatccagtggccccctgcagtcactgcccaaagtctcaacttcttggctggtcctccaaagctctggagaatctggccctaacctatctgtttttgctcaacctttccatattctactcatcctcaatcagctcatgagtctgctaagttgggctgaaattgtttccttttcttccacctcattcatgctcctgcacaggatgccctcctgcctcatctctgctgaaccttcatagaaccttctctcatctgtcctcttcctttttaaaaatttaaaatttttatttcctgactccccaaacttgttaccatccttttcctagaaaggagattattctttcccctaaactgctatgccactgtatccactttgctgaagtttaccaaaatgcagaaagaatgctgattttggattaagagagacctgattttaaacctacttactaactgggtgatcttaagcaacttacttggtctcttagaacctcagtgttctcatatgcaaaatacagatgataatatctaccccataggcttgttgtgaagaatagaaatcatgaatagatagtgcctgatgcactgagtagagaatgaatagttgctccactttagatcataattgtatgtgtgtcttatctaacatacttgattagaagcatcttataagatggggtatgataccttattcatcttatctcttaccttgccttaataaatgttgttaattgaatgaaatccgatggcactcttatctgtatcttttaaaaagcacttgtcctggtctaataataacatctgccagttgtacattgcctaacaattcactgagtactttcacatgcattttctcatttcatccttgccagagcctcgtgaggtcagaacgattgttatcccagtatacagagaagaagaaggctcagagaggttcagcaggaagcagagtatgaataaagagcagaatgattctgccagagtaagtgccagaacttgaatgccagtctgcctccagagcccatgttctgatccacctttttgagcccttgcaaactgccatgcacggttctttgtgattaggcaggggaggagaggaagtgaggggtcaggctgggtcttacatagccgtaagtgaggttccctttgggcacaccagcaacaaagtctgcaaagagaagagaaagttgtgacctaagggtggggaaagggaagcagataatggtaagtggccaagttcatgggctctctggccctgtgcctctaaccatccccctcccttggccccagcctggggacacactcaccttctgtgtcatcaccactgaattcaccaacagccacagagtatcctgggggacagggtgggtggatgttaggattcctgctttgaggacccctctgctctggcctatccaccaatcccttccccacccctactgggccttcatagtcagcaggcacatgacaagtatggcaggggtgctggggatgcctgagtaggagaggggaggcgagggggtgagtggggacaggagcacttgaggttctccctctgccatcccttccccacttgcttgctcacctaggtagctgtcatcatagatggaactggcctggcgagtctgcagctgcccctgaaccaggttgatcaggtactcggggtaataagattctgcaatctgctcctgagtggcagacaggatctggcctggagagagtatgaagagggagtagatggagaggaagtggcagagggggcttgggactctgggggctgactgggtagtatttcagaagtctggttcaagaaagggaagcatggggagggtggtggcatgtaagcttcaggaaaggaagaggagaattgggagtagggtgggaggctatgtgccaggggacttaaagaatggcagaaacaggcagggcgcggcggctcatgcctataatcccagcactttgagaggccaagaggggtggatcacgaggtcaggagtccaagaccagcctggccaagatggtgaaaccccttctctactaaaattacaaaaattagccaggcgcggtggcaggcgcctgtaatcccagctacttgggaggctgaggcaggagaatcgcttgaacctgggcagcagaggttgtgccactgcactccagcctgggtgacagagtgagacttcgtctcaaaaaaaaaaaaaaaaaaaaaaaagaatggcagagacaggacttaccttgccagaaatagcttcctggtccacctaaaaccacacggccagtctgtgggtgaaaggaggggagtccaacatctggtcccaatccccccatgtccaccacccacggccccttctctcccagaccactctctcaccttggtgaactcggcactgaagcctccttggcagtaaccctgtcctgctgcccagctgaaatctgtgaggggagaaggtggtgaaaatgagccctgcatagatgggtcatccaggaaagaagagagggcatagggaaggaggtgggagagagaaccagagaaagggccttcctggaccagacagtaagcataaaggctaacgaactgggttagcctttatcttaagcaacctagaacctcatgggggcacatggtaggtgcgagtcaaccctaagtatgtgagacacttcaagtatatgagaaggcagacatggggcacaggccccctcttgcccctacctgagcggcagggtgcatactccagaattcgggtgaagttatctgtggagaggtagcaggtgcccacggggtcgctcagtggctccttctctgtgcgccagctgtacagtggagcgcatgcctgggagggcccaggaggaggggccttcagattcagtccaataaggcccttcctccctccctccaggcccggccttacccaaccactgcccatcccctggccaccacaccactgagcttgctggcccctcaccaagatggaggagccatgggctcgaactgttgccccgaaccactgcaaggacttgtactccacaggctcctctccctctgagctggacagtgaggactccaggagccgagagccttgtggaagtgagaagggggagtcttactgagccatggacatttgagctctagggcagcccctaccctcagcctggggatacccaacaaacgcttccaagccctgagactccatgactcgctgggagtgtggaattggtaaggagcttaattctgctttgtgtagtctgtttgtgtagcctgacttatctctccactacacacatacacatacacacacacacatacatacacacgcacgcacacgcacacagaacctgggctttcttttttttttgagatggagtctcactctgtcacccaggctggagtgcagtagcatgatctcggctcagtgcaacctccgcctccctggttcaagggattctcctgcctcagcctcctcagtagctgggattacaggtgcgcgtcaccacacctggctaatttttgtatttttagtagagacggggtttcatcatgttggtcaggctgatctcgaactcctgacctcatgacctgcccgcctcagcctcccaaagtgctgggattacaagcgtgagccactgcgcccgcgtagaacctgggctttctagagttgcctccccaaggttcctgctttctcacccaactgagacaaggatgcctgctgtggagcaggggcaggaggatggtggggaacagtggctatttcccaagagagtaaccctttggctgcacttctttgtctatacttggactgtgtctctaacaccatcttgttccacctccttttttttttttttttgagatagggtctcactctgttgcccaggctggagtgcagtggcgtgattatggctcactgcaaccttgacctcctgggtgcaagtgatcctcccacatcagccccccaagtgggtggaaactatacccaactaatttttgtgttttttgtacagatggggttttgccatgttgaccaggtttattttaatttttttttttttttaaacagggtcttgctctgtcactcaggctacagggcagtggggcaagtagcactcattgcagccttggctgcagtgacggagaatcactcaagtgattctcccacctcaacctcccgagtagctgggactacaagtgctcaccactatgcctggctaattttttttttttttttcttgagacagagtctttctctgtagcccacgctggagtgcagtgacatgatttcagctcactgcaatctctgcctcctgagttcaagcaattcttgtgcctcagcttcccaagtagctgggattacaggcaagtgccaccatgcccggctaatttttgtattttcagtagagacggggttttgccatgatggccagtctggtctcaaactcctggcctcaggtgatccacctgccttggcctcccaaagtgctgggattacaagcatgagccaccacacccagctctgtctaatgtttttggtagagacagggtctcactatgttggccaggatggtcttgaactcctgggaccaagtgatcctcctgcctcggcctcccaaagtgctgggattacaggcacatgccaccgtgcccagcctgtccagtttttatttctggagacagatggccctagttcatatcctctctccaatgtttgctagctgtataaccttggataagctacttaccctctgtctcctcacttagaaaatggggataataataccttatacagttgttgaaaagattaagtgaactaatatatgtaaagtgttcacaactgggcctggcacagagcaactgatagctgttagtctccatcttcctcccatccatctgtgtctactcagaccttgagctccttgagggcagtggcttagtcatctttcagtccctgcagcaccagcacagtgcctgtcatgcactgtcacttagtcagtacttagttaaaggaactgaatagtttgtgcaacattccctgtctttgtctgtgttacggccctggcctcccagaattgtgggtgattcaggggaaatgagagccacatgtttctgaatcatgcccgtcctccttgggctgggctggatgggagagtggagtgagtgccatggggatccactgtaagcagttggagcaccagagctggtgctgagaggtcacgtggccggggttccagcaggctccacccctcgccccaggccccacccaggccttgcccccaggctgcagtcccaccccccagtccctccctgaatttcactggcctacctttgctgtcaaattcaatgggggtgcactgtgtggggctggcaccccaaggacagaggtagacagcaccaccctgcagcactcctggctggctggtattagccttgggtgctcccaccagcacactgaccctgtgggggggaaaagcgaggcagttgaggatggctcctagcttttcattggtgtctggaggcaggaaggacccaggcctctaggctggggctggctgggggtggagtagatgccccctgcgttgtatttatatctcagaagatgccacagatgccagaggcacaggctggagtcaggcggtccccatgtgccgctgtcactaacacaaccctcccctcctcccgccattctctgtcctctcctaccttatcctgttcataaagagaggaggaaccacagtcaatttctagaaggggaagaggggccagagcctgtacccctggcttctccctctcctctacgtacctgctgagattagatgtatagcttctggagcgccaaggtcctgtggagcctcagggtctctcatctagcctatatactctcctcccaagccaaatcccctccctgggccaagacccaggcatccggctgcccagccacccagccttggggcgtgtaggaggaaaatgtgagtcttggaaatcaggcagcaggagtggagagaggagctggaggacagtgaaaacagattgttccactgggcctgggcctgccctcaccccggccctggtgtgggcctccccttcctggctgggtctgtgtttcagcccttgaacccctttcccatagaccacccccagctgactgaattcagagtctgctctaccggggtcccagttctggacacagtgcttctgttccccctgatatgaggggaagtttgccctgtgtaatggggtggtcatagctaagggcctgggcagtcctcctgccgtcagctctgcctcattcatccctaggtctcttgcctccaagacctccacaccgctcttggctctcttggtttcccctaagggtctcctgccaggacttgtatctggcagcctgggcaactcgacccagcctctggaccagtgctcctgccagccttggcctctgctctgctctgtgtctgcctctggcactgcttctcaatccctctgtccctctgcccctatgactgcttgctctcttggttttggtttttgaatcctatctctctatctcagattttacatttctccatctctattggtttctgttcactttcagctttcaacccgtccaatacctaccctttccctgatatttgaataccttcctcagctttctcactaggcaagaaggcccaaagtgaaggattatggtagaggtcacaagagctgggggtattttccaagaagaccaggtatactgaggcggggaggagtggcccaggaggtataggggatggaagcagcagagaggacaggtccgaggggacggaagaggagagtgaggaggggtctgtgagggccagtggtgagaatggaggggagagaaggcagggtccagaggaataggagatgggtaggctgaagagggagagctcctgaagttaggaggggtggggaggggaggtgccagtctccgttactctggggacaggaaatgtttactgcctgtggcttcctgtctgtttccaacctctcacttctccgtttgtctcccacacccccacctccgtgccaggccccacccttctcacttaggcatgacatccacttgtggggtctggctgcaccgccctagggctgggtgatgtgagagaaggagacccctctctcagcaggggcagcccccagagaacttggttgctgccttcaggctctagaaagcagaaagggccaccaacctgaactagaccagaacagcagaggtacaggaagcagtgaaaggagcactggaccaggagccaagagttctggttcaggcactaactgtggacttgggcaataccctctccctcttcctctgggtgaagaagaggttctctcaaagtttcctggagcacagggctaaggccaagggaccctattcctgctgccaatttctccaacacccactgctcttggagaggagctgagcctgacactcctggggtggcctgaggaagtagcctggagtttagcagggttgcaagacagagagtttacaaagcttgtaaagcccacaagccaggggcatatccattccggctgtgcgatggttcaggatacctggcatgcaggcaagggacacagacctaggcctcctttcctcccggcacactacccatggcttattcctggacaggcagtggcccttccatcccagcaacctaaagtcaatccaataaatagtgcctcccctgccaacacgccaagtgaggtgactggtgccatggatggcatgcaagctagtttgtccttattttcccacatctttttcctgcttcctaaatcctgcagcagttgggcacttttaggggtctaagaaggtaacaatggagggtccgtgtgctattttcaatatttcagaaagcctaacggaaatcatgcatttaccagataaggtggcctaggctaattaaaacctcaagtgtatttgcttttggctggaattatatcaacttatgtgggaacctggttatctcatgctggtcagaaactctgattggcagctatagatgtttttggttaataaaaaatgagaaaagcgccaggtgcggtggctcacgcctgtaatcccagcactttgggaggccgagacgggcagatcacgaggtcaggagatcgagaccatcctggctaacatggtgaaactccgtctctactaaaaatacaaaaaaattatccgggcgtggtggcgggcgcttgtagtcccacctactagggaggctgaggcaggagaatggcatgaacctgggaggcggagcttgcagggagccgagatcacgccactacactccagtccagagacagagcgagactccttctcaacaacaacaacaacaacaacggccaggcgtggtggctcacgcttgtaatcccagcactttgggaggctgagacaggcagatcacctgaggtcgggagtttgagaccagcttgaccaacatggcgaaaccccgtctctactaaaaatacaaaattagctgggcgtggtggcacatgcctgtaattccagctactcaggaggctgaggcaggagaatcgcttgaaccagggaggtgggggttgcggtgagccgagattgcgccattgcatcccagactgggcaacaagagcgaaactccgtctcaaaaaaataaaaaataaaaataaaaagaatgagaaaaggaattcattatttcttactaaatgcaggttggcaggtacacttttctgaaatagagtctgagagaagaaataactgccagaatttattctgaagcctcagaaatggaagggttggtccttggagacacagactaccacagctagaaggcactgtagagagcatccactggttttaagacttcactgtaggtgcctgaggccacatggcataaaggcagactggcctcgttctgacactccctaagaaaaagttcaaagctgctcacctcgtcccatgttctcattctgcagatgggaaaactatctcagaggagttaagtaatgggcttaggtcactcataatccctcccagaatatgaagcagaaatcaggaatcctgatttctacgacagcattctagtctaccccattgccaacttattccctcctctcatatctgctatctccccagcttttgattaaccaagtcccagttcaatactgggttactgtttgactctgttggcctgacaaggtcaggggtggagagcagcaagtggaccagcgcccagctcctacaggtcctacagcagcatgggccaggccagaggaggacacctggtttggggtcccctagtgcattcacaagggatatgtatgattggctggggaagaacagctgtctccacttgtggcagttgcagaagggaacaaggagctgagctgagactggcctgcctctcaagctttcaagtgtcctgggccaagtcactgcctctcttcaagctttggattctctggcataaaatgatggatttcccttgaatgtttcctaaactaacttctggttcaaaatttctatgactcctgaagcctcagttgtttttattttttgtttgtttgttgttgtttttttgagatggagtctcactctgtcgcccagtctggggtcgctcagtacagatgtgatctcagctcactgcaatctctgcctcccaggttcaagggattctcctgcctcagtttcccgagtagctgggattacaggtgcgtgccagcacgctcggctaatttttttatttttagtagagatggggtttcaccatgttggccaggctggtctcgaactcctgacctcaggtgatccacccacctccgcctcccaaagtgctggcattacaggcgtgagccactgcacctggccagcctcagtttttgtatatctaaaaatggggcaataatgcttcctttgctttaacacaaggatttttgttacaatccaatggaaaaatcgatatgaaagtgctaaaggaatatgacagactattgttactatcactagtataagcaaatactcaaagcaagtaagaaatgagggaactaggcggtagccaggaaggagagaaccagaaacagaaacagctaccccataaaaaccatgccgcccatgtattgatcactctctgtggaccaggttccttttgtatatgttttctcatttagtcctcagaactccgttagtcaggtgtctgattttcacgggaagaccaggctccaagagcttaaatacctctccctaggtactagggtaccacgcaaaaaactagtaagtagtggggactcacacctacctctgtctgactgaaagctttgccctttcctaccatctaactgctttggtgctcgccctgtcctttaatactattttggtgttcaccacaagaggtgatgcaggaagaacaagaacactgaggctctccctctttggcaatggctgtaggtgaggggctgtgtttgtcttgtgttgtgggaaagggggtgaaggcctagctgtggtgggaggaggtcactggggaggtagaatgttccactgtaagagggtattgtaaataggaaatgagagggaaggagtgcaagctggacacctgggttctcttgggaggggagatgagcagaaggggagggggaagggatgagagagctaggtcctgttttagaagaggactttagggactacaggatcaggccaggggccagacagacacctaggggaccaggaatgtgtgaagtccagatgttttagaggagtgttttaaagggaaatttaggggaggggggagtaaagagaaggttaaatgccagacaactagatactctgatctgcgggaggagacctcatccccttcctccttccctcttttctactccattagggctgtgataagaagtttgagggaacctgggggagaccaggcctggcagaggctccaggccagggtgatgatgcaatggggtttgggcaaaaggccaggggggtggggtgggggttgggtggggaccttgaatagcccagaacaacagtcggggcctaatcatttttcttttctcccatccccaagtcctccagacaaaggagaatttgcctttctccccagttgtattagctagattaaccccttttctccaaaaactatagggactgagtagagatcagttaactgtctcatgtgtaaaaacaggtcgcttctgacagaattcccctcaaaccctgagatcctggggttggggtgggggtgagcagtaggaagctcccagctcagagatgtagaagaaaaaggattacaccagtcattgtggaggaccaggaatctggcatctatggcctagcccaggagcaaccacctacctctcttgcttcccaatctccccgccatcccacatttaaacagacacccttggttctaatgttgcttccactctaactcctgtttcccaagcctgtcagtaccccattttctaggcactcggggtccgggtctgcttatcactgtgctgagttgggaataaggatcctcctttgagatttccagggtcctgagtccttcattctgacgttcttggccccacggagcccccgtctccccagcttccgaccccagccccagaagtcccggtctcagcacagctccagccgaccagctacaggaaaccagcttttctcttcctcccaagagccagaggaagagggaaaccgcccaccccccttcacgcgcgcacacacccctcccgacacatcccagcacccgcccttggctgagttcgcccccagccccagggccccagtgccagggtccccgcactcgcccccagttctcggatcccctcgcctgaacagagattgggggcggagggaggagtaggagacagaggagaaaggagagggagccgccgtcctctctcgggtctttccccggtctgagttgaggggggaggggaggatgaggctggcccccatttaaccttccgaccccctcagtctttgactttcctcctactacacgtagctcattcggcttctacccgttctctcgccgcacaatggcccctacggatcccgaggtctcctggagcccccaaaagcccttcccggcctctgcgccccctctgcgcccccacccgccccaggtcccagcagcccacagacttcagccagagaccctcagctctccattcacgcgctctcctctcccttggcccggagacccctgcccagacttctccagctccgtgtcctctccccaccggacacatgtctccccactgatctcaaacgccagggcccctcctcacccgccacggtgccctccctactccagcgcgggcccccaactctagccagggcccccaactgcagctctattccttacaaactccaccctcaaacttaagccctggtcccctccagaccccagccgcgcccccagtctccaggcggctcccccacccccatcccgtctccagccctcctcactcacccgtctgttcccggccggtaaaactccactgagaatccgaagaaggagcccgggggccccgagagtactgctggggcctccgcgtctaagttgaagcccccgaccctgggtggcggcggcagcagcagcaacagcagcggcagcagcgggggtcggcgccgggggccccagcgcagctgcacggcgtggagaggggactctggcgtccggctccccatagcgcccgctcttccctgtcctggggccaccgacccggagccgcttcctaaacctcccagaggcgaatgactcaacgcggggaggagtttgccaaactcccggctgagccctccccccgcctgccgagggggctggcgggggggcattcctgggtccctggaactctgagcccgcgtcccccacccctaaggggcgtggggggggggcgcacccctccaaccccctttccccagccccagctggaagccggttgtctggactgggttagactgggcgggtttgggttcttccccctcctctctgcttccccctccttcctccccattcctttccagatgtacaacgtaaacgctcggaaaacgagtcggaaaagggagcggagaatttcctaatgaggaaaggaatcacctctggtgggcggaggaagcctgtatatgtgtgtggggtctccctcagtgctttagggaggagactttggggtctaaagagacaggagactcctctggcgtccggccaactgggattcccccttgccttccggggccgccgggtgcctgggttctggccagctggatttgggacacaacagttgaggtacagagacagcgttcgcagtcagcttgctagaggacctacacgggctcctcaagttccgctgcttcctcctccaagcttgctagtattgaaaacccaggagtttggggtcattcatcaggaggattctgctccagtttgcccccttcttggtcctagggtatgtaaacctctgctgagccccttccttggatctgacagttgaccaaaagcctgcgagtggctggcccctcagtacctgcttgattaaactggccgggttcctacaaacctggagaattgtgagaggtggtggtggtggtggaaagtcttgcaaagggacccaaccttcagctcctaatggctgtaaacgctgggagctctggccaggcacggtggctcacacctgtaatcccagcactttgggatgccgaggtgagcagatcacctgaggccaggagttcaagaccagcctggccaacatggcaaaacccatctccactaaaaatacaaaaattatccagatgtggtggtccgcacctgtaatcccagctactcgggaagctgaggcaggataattacttgaacccaggaggcagagactgcaatgagccgcgattgcaccactgcactctagcctgggtgacagagcaagactgtatccaaaaaaaaaaaaaaaaaaaaaatccaaaaaccaaaaaccaaaaaaacaatgggagcggaaagccaggaccccattcttcccagattcccctgtggaagtagaggaagggactctagaaagggaaggcagtgaccccctgcccacctcttccccaagctcaggctctgtgtgatgagatcacttttcaggattctagcctttatcttagtctgggggaggggactacaagtcctttcagtctctttcctccaggactcctcactttccagaataataccctgtcaataatatcctgtcaaccctgtcccttctgttctccagtcccctgcc

SEQ ID NO: 287 - DNA, 182004 bp, Homo sapiens
  source 1..182004: mol_type = genomic DNA
agcaagtgactttgttagctctgagcctcagtttcctcatctgtaaaacgggaatgctgacctgcctcaaagagtgtgtgcagggattaaagcacacttgctgagggcctccaggttccttcctctccccgtccccagccacacctgagctgggccatgcagaggcagcgccaggtggggacacgggctctgtttcctgagatcaggtcgcccctccctgatggtccccgccatccagtcacctgtggtgccgggtggaggccctgacagccccagtctagtgcctgtcgcaggacacaggcatcagacttgagcctctgagctgcagggaccccttggcataaccacttattaggccctgctatgacttctggcctaggaagaaggcataggaatgtggggcgtctgaagatctcgtgtatgtaacgcttcactagagcacgggctgctcttagtcccagttttgtgaatgaggaaactgaggcagagaaggtgaaatgactcacccaagtcacaggcggggatgatgctcagaacactgaagcgtggggactgtgaggattacacagtcaggacccatgtgtactggctgaatatcagggcccatcattcagtcactcgtcaaacatttgtgcatggctgctctgggcctggtaggcctgagcatggctgagacaagccctggctttaagaagctcactgtccagcggggacagctgcacccttcaacagccaaagcaacccatggggacaaaagtacgctcagcaggaggagcacacgcccacgctggagggcgctccttgcaggccaggaggaggttgggttcgagccaggttctgctggactggctggttagccttggccagtcacttcacctgtccaggtggcagttctggggctaacgtccttggcctttgcagctcaaacacgagcaagccagggagggtgatgatcccaggcagtggtggagagggtgcagggaggggcctcggccttcgcaggctgcccacgtggtgtcttccaggtaggaatgggaaagacatgggcattgtgggtgggtgaggctcagaggcatcgctgccaccctccagggtcccaggcagagccaagtccagaggccagttgggatttgggaaccaagtccctgaggctctgcctggtgagtctgagcaggcaaggttccatggtgggaactcagatttggacctaagactggagttgaactccccagcccagccattaatgagcaggagtctttgggcaggcgctcctggccctctcagtgcctcagtttcctcatctataaaatggagacaatacttactatctccttaccagattatggtgatgatcaggagcccacacagaaaaccactgcaatggtgttgagtcgtttgaggggtctcggcaagtctgggtttctctgatgaggatgggctgctcatggcggctaatgcgcaccccctgccccctgcaaagcacagaaggacaccctccgaacggctggcgctattgtttatttcttcatgtttccaaaagttaggtttatactccacccctacagttacagaaataaacacaacattaactgtactccactagaccgttagaaatcaaaacaagactagttagcaaatacagagatcatagcgacaccttgtccctgaaaccacccatcccaaagccacccgcagtgtcctaacctcatggagtgaacatgcgaccaggcgaatgagccaatggacagaagccatggtgtctgtatctcatacatggtcatgtatattatgcatatgtatgtacacaaattaagtacgaaccagcttgggattctggtgaagttgcttgtgaacagcttgaagcaaacagcatttgtcacaaagcccaggtgtcggcaggaacagcaacatcctggtgaaatccctgtgagtggcttttcagagtgagcttctgagaggtgattccacacagccctggaggaagggggtcggccaggctgcaggaggggacagtccctccacaccaccaggtcacagatgactcttgaagggaaaatgtaatcatttctgaaaagggggggtctgggtgctcctgcgggtgagaatcagaagaagaccccaaccagcaggaggccatggagtcatgctcaccagctctcccctgagcagtgcgggaggctcactcactccaaaccacactgacaatggctgtgcagagagaaggtacacagcacagaccctttctcacaaggggaggacccatgggagaagcctcgcctgtatcacctgagtcaggcttatgcctgggcggggcagatgactgtggcatcggggtgtggccaggctggcctgaggcagcagaggctgggcctttgtcaaggacagctgcacttctctgcctcccggtcaccaggctggaggggtcgtgctcctttagggcagccagcacccagctcaaggtctctgaatccaatggcccatgagccacagctcgggaaggagaaggagctgccggggatcccaccgggtgaatgatcagagtttgtttgtttgtttgtttgttttttgaggagtcttgctctgttgccaggctggagtgcagtggtgcgatcttggctcactgcaacctacgcctcccgagttcaagcaattctcctgcctcagcctcccaagtagctgggactacaggcgcccaccaccatgtccagctaatttttgtatttttagtagagatggggtttcaccatgttggccaggatggtgtcgatctcttgaccttgtgatccacctgcctcagcctccctaagtgctgggatgacaggcgtgagccgccatgcccggccagagtttctagggaatagaagagagggcagatacagaccccagggacattagtgaagccattcagcagttgtggccagtggccaatgtgagtgcccaagagccaagaactggtcttccaggctagaaggacaaacgacaggctggctcccttggtcttggggtggctgtctggcaggcaacagctgctttgctcagttggctcaaacatgtgacagcttcctacttcagtcggtcttccagccttctataaagcacacttggcagtcccctgggtacagagaggaatgtttttcccaggttgctttctcctttattgacaggcatgagacacaggcaggcccaggcacaggaagccccatggaacctgccaggttgcagctgggtccaatcccgccggccatgctgggtgactgcaggcccagcccacccaccacgtgtggacccagacacctccatgacaccaagggcaaagcaccagttccagggtggcctccccttggctcttggggtggggacacccagcagctggcactcagttggggggttatgtttgcagaatcacatcaccatataatcaaagcactgtcaggcagaacttgacccacggcctcagccccagggtgctcaatgcagactgtgcaggtgaccctctgaaactacccaaggactcagccaaagtgtggtctggccccttgctcctggagcccttcagcacatccagggaccaccatcaagacaggcactgcagggcgcagagccaacgtgctgaccaactcagaagcagaagcttaggaaccagagccccaagccaccccgatgctggcggggccaactccaggcgccgtgcctgcacagcaccacacaacaacctttgctaagtgggtcccttccttggacccagacactctcagtgactctgctcaggaggcagcgccaccatgctctggagaagaggaggccgccagagcccgggtggttttagtgggtctttccctgaggcagaaactccaaggccagggacaatgtgaccgaaggggagacaactctatggacactgtccagggatcaaagatggtcagcgtgcacccttagggtacgtttagcgagctgggctccatctctgccgctcccaggtgcgggtcccgcgtcgctgtccaggcccctcattgctgacactcccctggcttcactgggcagagtccaccggccccccagccctgggtgtggctggcccctccctacctcccatgtagctcccaggcctttacgaagcaaatctccatcctccatctccactcttggaaaatgcagctgccctgcacacccacagccccgcccccgccccaccacggaggcctatggacgccaccacgacaccacatggcagttactcggtatctgggccctggacgcgcaagaccccggaggccacaaacggtacaggaacacagccaggagtcacgctgcacacccccacccgtacctgaggcagactgggattgaaattttatttttaaaaggtaaagctgttttattaaacgtcttttaaggactgggagtatgacataacaaacttgagcaacatgtgtaaacacgtgtgaaatgcggtttgatttcagtagtttattttggagacaaagcagtgcaagaggccagccacgctttcctgttccccagggctcagggtcagaactaggaaaggtgacgtacagacattaatcggggttcaaaactcaagtcgtgtaaacgtggttagttgttgggtcctcagtttccaaaaaagccgggcagttctgatggcctctgcccctcgcccaagccctgtgcctccctcctcaaagtgggcatcctgcagcccagctgagccaggccgaaggacctccatgcactggctcgggggcctctctcgggacactcagcactttctctagcgtcctccatctcactgggcagaggacagcccggaagcctttttcactttttcaaagtaaactgctatcttaagacacaaaaacatacttgtgggggctgatgcctctcacccagcaccccacatcttccaggactgcagaggcttctccccaacccttttctctgcagagggggctgcctggatcaggggtcagacggcagagccagtgctttgctgccaaggtgatggggtgagtctgaggtgtgcagaagcgatggggggcgggtggctccctggcacctgctggctcagtgcttggggcttgcaatgagaggtggaccaggcctgctgggtgaggagggacccagcaggtgtgaaaaggagtgaacccactgggaagagggccccgatctccatggtgtcatgccgaggctcccgcgcctatcctcacctaggtgactttatggaaaggcaggctgcatcccaggggttagggcacaaagccagccctgtggtgctctctgatctcaaatgtccactagagacaagggggtggaggcccaaagacctggaatgatttgcccaaatcacagcacaaatcctcagcacaggcgccatcggctcgggcctccagccaggcagcctccttcccgggctccagggagcagcagtgctggcttaggggaaggagaccgctgtgcagggctaaatgggacgtgtgttggggggcccagaggacgcccagcttcctttccttccctttagtgagggagcacagcccagaccccagcgcggaactcccctgaggggtctgtggcctcctctggctgtggggagggaggggttagctgcacaccaggcagggtgggggctaacaaagccttggtggagaccagtaggaggaaaaacaaggaaggggcaggtcagggagtggggagtcaggcagaagggaagccactctcacatgcaccgatcagcctcccacagcccgacatgggcaggcttcccccaagggtcccggtccacagtggccatggagaccaacagacagggatgtgcacagacactggcatggcagccatacgcacacccctcacctcccatccagacctagtgttgcaaacacaagcgtgtgtaaactcagttaggaggtctgcacagtagagagcaggcggacggccccactccccaacggtggaccacctggtactctcttccatcccccactacccctcatttagatcatgacatcagagaatcaggttaaaaattaaaaaacagaagaatcagatcactggggattcttagtagtagcatcgccgttgggagctgctggcccagcgggtgtgctctgcgccctgcgctgcccctctgggtcccggctccgtggctactgggaggaggccttggtggccagggaggccacacaatgctgctggaagctgggcgacacgccggcgttgcagccgagtctctggtgcggcagcttggcggtgccgcccgcgtcggcctcagccttccagggcgcgtcctggcccatcatgctgccgcagcagccggggctggcgctgcatgtccgctcgcccaccaggccgcccgccggctcggccagaagcttgctgtgcctcagcagggccacgtcccctgtggctgccatggctgtgctctggccctgcaggacagtggcgatgtggttcaggaggtctgtgaagaactcgctcacgccctcgtagcctgggggtgggagagagacagcacaaggggcgtgagccaggggcacgcatcatgcagggaggaggaggaggaggcagaaccgatgggctcctgggatgaggcagggtgtgctgtcagcgtcccatttacagagaaaacgtgaggctcagcagataaggggggctgaggggagtcaaaaagcttggacgcccaaccaggtgcgtgctcctcgaccttcagctgttgccagggtgtgagaagctgaagaacctgagctgaggatgaaacttgcttgtccctgttcctctcaggcacagctccactgtctcacccacccatccacttgcatggtaaaagccagtacatgtgcaggggatgttggcgtggctggaggtagcagcaccaaagccagctccacacacttggagtaataaatactcctgaggcccagctgagtctggcctcaggctgagtcccggagaccgcttccaccctgagcctcagcttccctgtctgcaaactgagaagagaaggctgccgcccaggtggaggctgctgtggcactactgagagaggctgggatgtgagtggtgtctgcttcacaaagcagctgccgccccaactgagtctgcttccttctcaccacaaaatacctgcagggaggccccctgtgtcccattctctgaggatcacagccaaggaacggaaatgctgggcatcactagcaacatccaggcctgagacaagctccagggcgcagcatcacatgctccccttaacagaggggaacagaacagaaaccatggtacctgcctggggcaagtgcttcctaacacagttgcgaacatcagcagagccctcgggagccaccaagcaggtttcggatctcaggggaggattctgctggctcccagcaaactgctccaaaagagactcacacagggcaagcgccctgcctgcctgagccaacttggaggggcgggagttttcaaaaaccctgggctgtcctctgggacaacatttacaaccatcagccccaccagggtgggaatgaaggttcagacgggggcaccctgtgccacctcttacagtgcccaggggcctggaagatgagactgctgaatctgcccatgcccttacttattcagcaaacaactgctgtggtttgaggaagcccaagtctgagaggggatgcaggtgcccgcggtggaaataaagatggctattctggccggcaagcggcgcctcccgagctggcactgtgcgagcgtcccgcaacatcctctcgcctaatcttcataatgctgtccccagtttacagatgaggaggcatgaccgttaaccaccacggggagggcagtgatgacgtccatggcgttcacagcactcgggaagtagcagccactgggctgtgagcgccacggtcctcagcccaccgcacccctgcagcccgtttcacaggtgaggaccctgaggctcaaggtggctcctaagaggcagagtgggatctgaaggacgcccttggtcttgtgtgtgtcttgaataccacatggtgccaggtcccccaccataggacccggggtgtccgtcggccctgggctaggcctggagggcagggtaggtgtcccgggcacgggcatggctgttgggtgcctagggagaaatgcagtggaggagctccaccatcaggtcagcgccagggaacagggagccattctccagcaacctcctccagcatccccagacaacgcccagtggcccagggcagggaggccgctttctgtggtggtgcagagacggctgcctccacggaggcctgaggataaacaggagctcggggagcggactgaggcatgaacctgcagggcagggtgccagctccataccagcactgtgcaaaagccatctcctctgtctgcagggtgggaaactggttcccactgcagtgaacactgagacttaaacgttaggtggcttgtgccatcacagactgtaaaggcagaggcaagattcgaacccatggctggagctgagaggtggaaaggctggggctgacagtctgggccccatccagctccaccacgtgactttggacaagccactcaacccccagcctcacattcttatcagcaacacagagattccagcggccctttgcacaacgcctcgtgaggacgaagtgaggcgtcggggcaggcctggctcacggtgtcatcagcgcttgcagctgttgcggttattactccagagccagcccctctctggaggggccctctcccaggcctctcccacccacgtgctgctggacacccatggcccaaggtgcctcctgtggggtgcaggagaacaggcctgctgctctgcttggccccaaaagggtgctctatggtaaggcggacacactgagctatctcccggggaaccagctctgccctgccagagccctgggcctctcctcagtaccaggctccctcaccagtctccgccaggctcagccatagtcccaccccatctgggtggcccttctcttggcttctctggaagaaccctccctgtccacactggctcacagtgccccacactgactcacaaggccatcccttatctgcacccatagatcgcgaccatctacacattttgtgttgggaggcactggccttgctcaggtgcaaagcttcccaccctctcctgtctcctccctccttccagaacttctcttctaacaggcctccctgtgcccccctggccctccagccactgacgttgtccccttttcattctgccactcaaaacatgctccgtggtttagatcccacacttccttatcctgaacgtcccttgcattatcctgaatgtcccttgcgccctggttccctcatacctgccagcaaaaccccatgaaatcccagctccagctaaacccatggtttcctccccactgcacccagaggcaatggagaaaaacacgatcgtcgcacgggtctgccctttcagttcacaagcacagatctcacggtggctgctccccgactcccagggagagctccaacgtcctcagttcaccacacgcagctcccctgactctgtcctccagccttcctgccccgcagctgcacctgctgtagccacagggctccacggtgcctctcctgggacctgcccctgtgctccagtgtcaccacctcacagaggagcccgctgaccgcccgctctgtcctccgcctcctccagacaggggtgagctctccccaggcagggcatggcagtggagctcaagctgcatcagcatctggaccagctgggacacacagcagccctgggcgacagcagccctgggtaaacaccagctgaatgacaggagccagcacactcctctgagccttggcttccttgctgtggccggtgctgctgactgcgcctgcgcatgctctcagacgagcggaggtgacacacacagaaagtgcccagccagtgtgtggggccaaggtcctgcctcacctccacgataaacaaccccgagtccccacctgccaggcacagtctctgaaggcaggaggcatttcctgaacgtttttgcacctcagcagctagcaaggctggcttcacctccacagcagatgctttacaagggtcaggatggagaaaggaacgggggacccccatctggggaatggcaggcaccaaggcatcaagcgcggctctgtctctgagctgctgcgggaggtaaacaagccactgagccttggtgtccccagggcgaggcacgcagcctggtgaccgcgagctgtgatgtcacaccatcgttcctcatgccctgtgctggggctctgctcctgcggtccccatagggcccctcactgagagctgaggggcacatggcagagcctggctcaatgccagtgggttcctagggcccagctggcagcagggaacagactccatagcccagggctcctccccaggcctctgcccggcgctgcagttcagggtggtggaggcaacgtgagcctgggagtctctggcctgccaccaatgtgctgtggggcctgaacagcttcctcctctctagggcctcagtttcccaacatgtaaactgcagggggctgtaatcccttcaaggtccttcctgctccttaaatcgaggagggcctgggggaggggctgatccaccaatgacgcaggtggagagaggaggtgagggacatgcgtgctgtggccactgtgcctggcgctccccaggtggacgtgcagctctccctccctcctcgcacaccccgtaagcccatcgcgcaggtgaggctgaggcttctcggggctgcacctccccggacctcgtggtgagggagaaagctggctttctggcctcagtcaccccgcctcacctgcctggtcacctgaggacagtctctggaggccggtcagtggaggtggcctggccgccactcacctgggaaggcattgatgtcaatgacggcgtgctgccctgtctggttgttgatgatgatgtcgatgccgaagagtgacacgcccagtgcctgccgcagggcccgggagagctcccggatgacctcgtcgctcggccgctcgaacacgccctcgatcttgtccagctgccaacatacacaaggaagtcaggccatgggccgaggagctgcgaagccacaccacacagacagaccccccacaccagctgccacgaggccctggcatgcttcaggccaggaagccagacagacctactgtggtgagcacggggcggccactggccaggtcctgccctctgagggccgccaggcacgaggtgtgtgaggctcattacctcctgtgggctcatcacagcctggaaggccagtgccagcactgcacattacacacagggaaaccggagctcagagagggttggggctggtctaaagtcacacagctcaaaagcacagggcagaatttggacccatattttttagcctctaaaaccaaagccttttaacagggaggaaggagatggagagtgtgtcagggacccgggaagacatggtgcagagcaccgaagccggaacttggaggcaggaggatgtgggcccctgggaggggtgggagaaggagagcggccccagggaggacacaggggaggcaaaggtgctgaggccagcagctgcgggacatggctaggagcagctggggcgcagagccgggcacaagtgaggagttctgatcagacccccacttgcctgccatcacagagacccccaaggaggtgagggtgagggccctgtggcccagcaggccagtcttccttcccaaaaaatgctgtttccaaatgaactcacaccctaaacaatgcgggctccccagagaggctgctctgctgctcctgcctgcctcctggggtccaagctcagctttcctcaaggtttccatgtgctggtcaggccaccctgctctgttctccctcccagcccggcactcccctctgccactcaagtcctgtgcctgtcgcagctggcctgggacaggcacacactgtcatgggctcagcctgcccccagccaaggcctccaaggaagtggggcactgcactgggaaggattctggagtcagagagacgtgggttccaaacctgacagtgaactcctagctctgtggacttcggaaacagtacttggcctctctgtctcaggtttgctcttctgtaaaaggaagcaacaggcctccatctcagacttatgttgataaggtgtggacagcatgtgcccggctgggaggagattcatctgaattctagggcaggaactgcatcccgtctcctctaaatcagccaagggagggctcacactaggtgctcaataaatagtgaagttttgggggttgtgggcttaggggccaaaggggaagggagtggctgatccatgaaagacaaaagtgaagctgggttcaaaagctggagatggaataaccatctgacctggcagttctgctccggggtacacaccccagagctgagaacgtgtactcaaacggatgctgtccacccacgctcaccgtggtgttattcataccccagcgtgcatccacagatgaacagctacaaaaactggtctatccatacgacggaatattgtacagccataaaaaggaatgaacttctgacatatgccacaaagcggaggaaccctgaatacatcatgctgagtgcaggaacccagacacaaaagctcatatattgtgtgattccatttctacggaatatctaggacaggtaacgccacagagacagcaacgagctcagcggctgccaataacatgaggtgggggaaatggggagtgagtgccggtgggcccagggttttcttctcagtgatgaaaatgttttggaaccagatagaggtggtgattggacaacactgtgaaggtactaattgccactgaattattcgctttaaaatggttaatcttatgtatgtgaatttacctcaattttattttatttagagacaatgtttcactctgtcacccaggctggagtgtagtggtgcaatcacggctcactgcagccttgaactcctgggcctcagcctctggggtagctgggactacaggcgtgtgccaccatgcctggctaattttatttgttttttgtagggacagggtctcactatctttcccaggctggtctcaaactcctggcctcaagtaatcctccctccttggcctcccaaaatgctgggattacaggtgtgagccgctgtgccaggtgcacctgaattaaaaaaaaaaaagtgaaagcagatcgacagggctggggacagagccctggtcaccaagaaaaatggcccttacccaagcacaggaggctgaagtaaccactgggaacttccagggagggaagcgctgagcagggacccacgcccgggcgccgcccacgctccgagggacccatgcccgggcaccacccacgctccaagtccgggcgccgcccacgctccgagggacccacacccggatatcacccacgctctgagggacccacgcctggatatcacccacgctctgaggcctacaccagcgcatctcccaccccggctttgcaggacacacagggcccccctgctcacagcctcaaggccttggtgtcgtatctggaagaaatactttctagggggcaggagtggcctggctgtaagagacactcatcccttagcacttttctttctttttttttttttcttttgagacagggccttgctctgttgcccaggctacagtgcaatggcgagatcacaactcaccgcagcctcgaccttccgggctcaaatgaacctaccacctcagcctcctgagtagccgcaactacaggcaagcaacactacgccctgctaatttttgtattttgttttggtagggattaaagatctcactacgtttcccaggctggtctcaaactcctgggctcaagcgatctgcccgccttggcctcccaaagtgttgggattaaaggtatgagccaccgcgcccagccacttagcttttctgagcctcctgggtcactcttgccagtgggggccagaggctaagcctagtggggcagctcagccactcatcctgcagcccaaggccctcactgagtcagagagaccctggtggataccttggagctgcccactctccactgtgtaccctaagccataacagaacccttctgggccttgttttcttgccccagtaaatggggtaataaaaacatctcgctgtgagattgtggtgccgacgacgggaggagctgctgcctcaggctgacagcacaggcccagcagcaagggagcttggctgctgcactgccacacgccccatggcacgccatttacaaaagtgctctcggcctggttgcagaatctcagaaatccttccgaagttgtctggttatccaaaaccaaatagccatcctaggacaagatgcctggggccctcaaagcaagtgatctgatgacgttctggaaagcaaggaggtgacagaggaactgggaaggcgttcatgggtccccagtgggcctcggcacccggctgccgagaccgtgcccatactgcacacctggcaactgcggtgggtgcttctcacccaggaactccctggactccggaatccttctggggcaggaagaagaaaccaaggctcagagaggcgacgcgactcgccttagcttgggccggaccccaggcagtcccgtcagagtctgtgctcttaactaataccctagactgaatttcgaaaagcaaaaaatgtatggggccctccaagttcggtggggctaggcccatccgcaggggcatcccactgggaagggagggggtgctttaaggccagaggagggcttcctgcaccagactcccagggaggccaaggcaggactggaggagccccaggtgggcaggggcaggtggatgagcagcaagcgtgtttccgcacctgggaacagagctggctctgtcaggccagcctgcgggcgtccaggaggggctgatgtcccagtggaaaaggtggtgctgaccgcatttctcttttctatttttggaaatcgtcagtcctggcagattcctgactagcagccatgtgctgagggaaggaggaggtgactgcagacctcagaggtgaagggaagggccctgcagtgtctctaggctgaccccttcccgttttacagatgaggagattaaggctgaggtcaacaagtgataatccaagacagtgacttctggatgggtccttctgccatcacggctgctggccttgcccctgagaggacactcagtctgcaaatgccaaatcccctccattgcatgggctgccgaggcccccagagcaaagccatgcacggaagaagccccaggattctgaagcttagaagaaagccgtctcttgcacagaacatctcataatattctcagccaggcactgaggctctgttgaaatctgttcccaaagcctgatatgttcccaggggacatgtgtcaacatcctgagggatggcgatgttccctccaggtcctgcccacgcctgtgctctgtctaatcctcagcacactgctggctcctcagaggaccctgacacaaaagacagacagacagacaggccatctgggttctggggcagccccccgagggacacgagcactgccactggagtggaggctggttcgttggagaggccagcccaggacagggaggaagagaccagcaaagccccccagaagagcagcacacatgcatcctcagaacagcaggctccctggcagagggctcttgagtttagggaagtagccgctggctctctggacttcgggcaaacagcagagggtagcctttcctaaattctttggggtcaggtgctcaggaatcactggtgaggtcagaagtcctaaattcctggaagatccaactttggagtcagacagatctggggtcaaaccccagccttgcaccgtgtgaacagccttgtgaacgtgcaaagatcactgagcctctctgatgccatgagacctgattgcgacccgcactgcagggcacctgggctgacactggccacagcaacactcactgaacggccagaacgcccgttacccatagtgctgggggcagggtaacactcctgccagcctcaggaccactgcaggacaaaggactgagatggtgctgcctccacagcctttttgaaaatcaggaacaaggcagattagagagcagttcttccaattcctcatgctgggagaagggtcagcacaccttctgtgtgggcagcttgcagtgagtggtctgtccctgcaagcccagtgtgcccctcacctctccctgtgctgggccgggctgcaatggctgctagcatgaaaactcgaagcaagcagaggaacagggggctctggaacctcctggggcctgtggcatggaggcaaacgtccttcccaccctaccctgctggagagcttggccaaggaccccatggccacagcagcccacacctaggcccacgggagggcagtttcaggccaggccatcccagcagagggacccacctccgtcaggaccgatgacgactccggctttgacacgttgtggctgttgaagaagatggactcacggtctgaaaaagcgacaggaaggagccggcgttagaacctcaatgcagggaccacactgccgccacctgacaccagggggcagcatcaccccaggcacacaacacgtggcccccggctctgcagagccctgggctccagcaagctgggcaccagccctgggcacggatgtgtgccccatcagggctccggttcaccttctcctcccacataaaagtaaccgatgtaatgagctgacctctgctaccatctcacagcatcacatctggttttccctgaggccctgttcccaaagtgtgctgtcactatacagggaagtaggggaaaagggctcggtgggacagctaaacacctgaatatcacggccagagagggcccacatcaaagcagcctcttggtgttatttaggccagtgctcccagcccacgggactctcttttggggaacatgctagagacatagggacaggctggcaccggcacgtgagcacttaaaatacaaagggttctggtggttcttagcgacttagggaaaaaaataggaaatcagagaatgtaggcttccacaggatccgtccaagaaagcacacagcacaatttctctttggcaacggaagctggcacagagagtctgaaataccctcaccccacacgtctggctcccgcctgcctcccacaacacccggcccgtacaggcccactggggacccgcagaggcagaccagtccaaagaatactgaaagtgcaagtagatcccacaggagaaatgtctttggggagtaagccaaagtcacttggggaaaatgtcaggtcggttggtcagaaacacgcttgtaggcactgggaagcattggcacgcaaatgcaagaattgcagaaccatgagcctcaggccgagttctggaaaaggctgtctgtcaccatcccacgacttcccccaaggctggcacgggaccgtcctgggccgccagccccagcagcccctccttgagtccttgcagggtgaggcattgtggctcccacccccaggatgcaatgcacacccctggcacccaggcgcctatgtgcgaggacaggagggcactggctgagggccgctgcgtgctgggggccatgccaatggggcacctgatctggctgccaacgacccatcagctccaggacttcacagcgccgcaacaattatgcatgagggagtgattcgggcggaagccaagcaggcaggcgctgagatgtacccggcgtccctcccgctagcggggcacagaggcccctggctgccctggtgtgcccgacagtcctcctgctgctctgaccagagccagtccagacgggggccatgaaatatggtcctggggaggagcctggggaaaataaacaccccgcaggacatgtgtcatgtggcccccaggatctctactcccaaggcaccgacagccaagaagagggagtctgtggggatggcataagccctgtgggcttgcggctggaacagctcgagcagctgggaggggaacgctgcccaccttctcatcctgtagcccagcctggctcagccccctgagctcagggcaccttcccacctatttccctgtagatcctgaatagcagttgccgaatggcggagaaggcccagggggaggaagggccaccaagcgcaggtagacacagcaaagatcagggaggttgggaagtctgcaggagccgcaaggagaacacgtgggtgctgagtgggtgccaggaagggccagagctgggtactcagaggggccggccagtgtctgctcacctggacagatcatgcaacacaacagtttctcctggcaggaagagctggagtccaggacatttcaaaaggggctcttttctcctcctggctaattctgtttttctttttatttttttgagatggagtctcactctgttgcccaggctggagtgctgtggcccgatctcggctcactgcaacctccgcctcctatgttcaagtgattctcctgcctcagcctcctgagtaggtgggattacaggcacctgccaccacgcctggctaattttttgtattttcagtagagacggggttttgccatgttggtcaggctggtcttgaactcctgacctcaggtgatctgcccgcctcagcctcccaaagtgctggggatataggcatgagccaccgcacctggcccttctggctaattctgacctgggagctctggccagaagacccttttggcagggcagtgagagatggtctgggctcagttcctctctatgtgcggtctgaacaggggtcggagggagtaggagcagcctcctgtggctgccagtcacccaagagatgatggaaagctgaggcaagtgagaaggcatcagggaaagaaacctggtggccagctccaagagagtcggttcctctaacacaccagaccagggcgttgctcccagcatgtatcagcaagccctcactcacgacagcaccctggattttgggtgccccatgcagtctgttcctggactagcccaatagcaccagtggagaactaccaccaacgttctacagggagggagggcaatgaaaggaagaatgtgtgtgttttcttctcaacttatggatttaaaaaataggtttaaaagaagaataaatgataagattagcccccaaacatcccagcaactcagccgtacagccacgagctgggccacactgcttttagccttatttccttcatctcctctctctctcttgggaggcgaaggggatggggagaatgtgtcctaatgctacagatggtgacccaagtcatcttccagttgccatgagtatcatctctgcagagggaaatcctgagctgccctttccaagtggctcccctcacccagtggtatcccaggacatattctcttcccctcagaaccccttatctcaggccacagttgacccttttcttatttctctccttgtgtgcagtttctcccaccagaatacaagctcatgagggcaggaagctgggtgcctgcctagtccctgactggatccccagcagctcacgcagggctgggcacatggtaggtttgataaatgctgtatcactgactattaagaggctctggagaggagctcagcagactataggctgtaagcccggccacctgcacttgtaaataaagtttcatttgaacacagccgtgccactcatttacatatctacagctgcttttgcactacaacggcagcattaaataattgggatggagctggaaatgtttataatttggccttttgcaaaaaaaagtttgctgcctcccgctctacatggtgagaggtaccactcatgcatgcctaagagaaacaaggctcaagctggagagaataatggagggaacctgcataaagctgggagcctgcgctgcgtcctcagggtaaagacgagcaagaaataaacccactctatagaaagggagagcaaaggaacccgctaatctctaccctggcacagggtggagggagggaaacagtctctctgtgaatgcgaaccacaggcagagaacacaaaatgttcctggtggatggcacaagccacaacctgacttcagctccagccaaagcctctgcatggatgccactggctataaggcacacttgatttgagatgtcaacacgtaaaaaacaaaagtgcagctgacaggcaaaggagactggcagttgtcgagtgaagactcatgtccctgtctctatcccaggtccagaaaaatcccactcaaggaacccccatccctgcgtggccacgggaagttgggggacatgtcattgggcaaaggaaattggaaagctggggtgagggccggaaagaggccagagtcccaaaccccctttccaactggtccagcttaaaaggctgctgttgcattacacttcttatccagaaagagaacatacacgtagaaaccagaggacccacgttagctccctggcacagtgccctagagatggggacacagaatcagctttggggatggagagacacactaacagttacttagttcacgtgaacagaataaacatttctcctttttagctctgtgtgtttctctactatttgggcttagtctgcttttttttttttttttaagaggcaaggtcttactgtcacccaggctggaatgcagtggcatgaccacagctcactgcaaccttaaactcctgggcccaagcgatcctcctgcctcagcctccttagtagctgggactgcaggtgcacaccaccatgcccaggtaattttttaatttttttttttttttggtagggatggagtttcactatgttgcccaggctggtctcaaattcctggcctcaagcaatcttcccaccttggtctcttcaaagaactgggactacaggcatgagccaccacgtctggtctcctggtatgcattttatggcaaactggcaacctagaaatagccacacaagaagacacacaggcaaggagtcctcgtcctcacagatacaggataggagcccacactctgctgttaatggttcccagcgtcgagacggaaactggcccagcattttgcaaccagaaggaaaaaggagaaaacagaaaaacccaaccacagtggataagaaaggagatctgacagtaaatttcttttagagatggagtgacctgggtaaaaacagaaaggagttgatataaaatataactcctcttaatttaatatattttccatagacttaaagcattattattttcttaaatcagggaataaacagcattttaaaaaatgtcagcctcttccagcccataacttggaggaatatctcttggtggtatatagccacatataaaaatatgcttccagcatttggctcccacccagtgggcaggggctgggaccatgatgtcccaaaccctgaaaatacagccttgagtctgggagccacacgcccagctaggaaggccacctgccctcggaggaaaatgaacacctgcacgtttccaaagtatccacgctctgcatgtgtccatggaaagagaagaggcatctaggggaagaagggctgagagggcaaccgcagcactgcagcccctccatgccgggcggcacaccagccaggagatgtggatggccacaggcagtccccggaggagggatgccaagaggacacatctgtttgctcagctggaggtaaaacagccggcgtctgaacgcttctgatgatgtgggttccccttgctgaaagaaatgtgcagctgatttgaacaagccacagcggggcagtgagtgttctccaaagggtcctcctggaaagctacttatcccaagacactgccactgttccaaaggtttccagaacgtgccttagagatgccttcagaagccactagaacatcctttcgagcagctccactgccagcaaatctttaactcagtgtccgtttttaaaatggctgaggctggagagggcggtgagcagctggcggaaggaaggcccctcagcgcagtggggtccacaggctgctccctgggaggctgcttctcaggcccagcgacaacagcatcatgcagagaacgccctatgtgacacccacgggactcctagaccaccgtccactgactcaaaacacgctcactggcacggtaggagtcctgcacctaagaagacctgtaacccggcagctgctgcttctcacagtctgatttaccctggcagctatgcaggtagcagcaggcaactctgtctcaggctccccaggggaaaatgagacccaaggtaaagatggctcagcgggagacagcaggcagcacctgccctggcttccctggaaggccaatccacgccatgctggccacacctgtcccagcgtgttcctccatgaatatcattattgtgtgggtcccccagaagcatgctggggacagaacacttctggatgcatcctggagtctacggtggttcaggtgggtggggccccctacaatgacccagggaatagggacattttactagttccccaagacctctttatccaccgtacacaactgtttccacctttagagcacctctccatcccaccaagaacacagggtggttggggcagtgccgaaggacagacagctgctgccacatcccagctgggcccctgagtcttgctcagcccaagatggtgagaagagcagttacctgatgtgcctgcggagaagttcttgagtgagggcctctggaccacggtgtaggactcgccaaccacgaacaccttgtacaggacggcgttgtggttgatgaaattctggaccacgcagggtggctggatggcgttcaggccctcctggttgaacacgatagccatctgggaagacaaggggtcaaaagctctgtcagaatccaccaccttctcagcctccaacacacaggtgtgtcacctgtccagagcacctccaccaaggcccatccctggtcctgtggcatgaggactcccctagaggagccttgagccagggtgagtggagtgggacttgtgaagaacacctggggatgcatcccttctgccacggggttggagatcctcccttcaccgggcctgccatgtgagatcgagctggctgtgcactgcacaacttctgagagcgtgacaccacttgtcgcactgtggtccagggaagggggccgctgaggttgtgtgctgctcaaccctctgacatcctaaaggatcctccacaaagacccgggaggaggaaggaagcagatgactcgggcgcaggagtcaggaggccttgggtcaaagcctgtctgatgacaacggctgcctcttgtcaagcagttgtgacaagccgggccctgttctgagcacgtacaccagttacctagtgtctccctcacaatgcacatctgaggtgagcatacaacctttcacagatgaggacgatgaggcgctgagaggttcagtgactgctggacagtgagtgagcccgggatggaactgggtctgcacagcacccagccgcgcccctacacacggagccatgtgatactccgcaaacaacaggcctttgtgctcctggtccccgactcctctggggaaaaaggtccctgacaggaggatctggtaggggctggggtagggagtgcaggggggcagctgccaaaaccctctcagccccggccagcacgggctctgcacagggtctgctctaaggacagaggggtgggccctaggcctagccgatccagctgctggtgccagggtcatggctaatccctcagcccgcagggccccaggaaggagccaccagacggctggggctgctgagcagggataatgggccccggagagctggctgcctccccagctgccaccccttgtgtcagctgtcacggagcgccggccctacgtgcctggagctcagctgggcaggacagacgtggaaatccaggccacatgggaaaaacaaaaagtgtgtgtctgtgctgggggcgttggggggcagtgaacatctcctcagccttctgacaagaataaaggacaggaaaaacacgagcagctctggagtcaggcaggggctggaatgcctgctgagcacttgctgtgtgagccgaggctgggcccccaccctgcttaagcgccactgtcttcctctgcaaaatcatgggtggcttcagggatgctttgagcttttggctaagttatagcttaaaaaaaaaaaaagattccactgtggagcaaatgagtaccctcacactggctcaaaaacaaaacaaaaacccaaataaaagagttctgagaacataaaatgaagacagagtggtttagcagaaatggtcctggttttggttgagtctcgggctgggagattcagaggccgggagtgcgcgggctgggatgcagacgaggactcccgatcagaagcacctgctgccctatctaaagccagccatgcacagtgctattttctgcccctgctgtacttggcttccccgggtacccctggaatctgtgagaagcttgtcccccaacctctgccgatctggtggacagtgtccaccccagagggcacgtccctgcaatgctaacatgccccgtctgcacagagagtccgctggggtctctgagtacatgggacgtggtggcacaccttgccggcagtggacccagacagccggctggggagtagagggaggggcacctgtacaaacatcctggagccaggcggctagaatgaggagtgatttatagcttcccctgagcgtgctgaccccatacttgagggctgagagtcccgaggcccatcaggggcatcctgagaggggtgcacctggatccagaacccccatccccttcagcaagtaccgggcaagtaccagggcagctggttccggcagctcatccaacagtccacccaggcaaccctggcagtgacccctcatccttcacagaagccgctaacgtctccagtcacaaatgtgatactctgggtggctgggtaatttgccaaagtcgcacaaatggcaacacacggcaccagaatcagtcccaggtctctgggattccacagccccggccctcaggccttgagtgactcgcagaagtggctccctcctcccgggctgccaggttctgagttaggcggatctactcacgttaataactacgctcgtgcttccatctgggaacacccaagcaactcacacacagaggaaccactgggtggttaaaggggctggtggaaggcgggcaggcagatactggggctgaggggggcctggggaccaacgctgctgctctcgagccttcctgctccctccctggcctggtacatcctggagggtgctgccagcaccaggcacagagcccaggtaggctgcggcaggagggccaacacccacaggaagactacgtgagggctcctgatttcagacaactgacaacgggacggcgggctgtctccacactccttcccatcacagcatgtgctgcgctacgctgacactgtctgctgatacttccccggaagtgcaggccagggataaagagcagtacataacccaggaaaggcccatgctgctgcatcttccccttttagtcgtgagctctggggagcatttctgttggtggggctttccaaggacaagccttccccagagagcccactccggtcagatgcctgttgcccagcataccccaacatgtgcccactggggagaccccaggcagtgctgtgtccagggcaaagacaaggccccaggtgtggctcctgagggtggtacgggccctggccccagcgaagcccctgcatgaccatccactcctctagcccctggagtcctcacaggctccttggctctctctagggacaggactcacatcctatgcatctgtctcctggtctccatggtcctcaaggtggccgggaacatcatagagtgaataaaagaatgaatgggcgggtgggtgactcatgattcaaagcattccacagggttgattctaagcagccctcttttcctccctggcccgtctcaattcagcagcatggcagacccctgtggcagtgacagagccttgtcagagctaacagccctcatgtgggcccagcccggtgcctgccacaaaacaggccctcgaagagatgacactgatggcccaaaggatagccagccctgcagggcgggccggactgaggcatgactcgcacaagctcccctatggactgaacgtgtgccccagaattcctacgctgaagcccatgccccactgtggtggtatctggaggtggggcctttgggaggtcttgagggcagggccctcaagatgggattagtgcccctatcagaagaaatcagagagcttgctcttgctttctgcccctccccattcacacacacaagaggccgtgtgaggacacagtgagaaggtggccatttgcaaggtaggaagagagccctcaccagaaactgaccctgctggcaccttgacctgggacttttagcctccggggctgtgagaaaataaatgtggcgaagccacccagtgcctggggtttgttatggctgccacagctacgacaggctccacagaggacaggtgggtccccagcacatcctcctgccttagggacaggacaggcattgaggtgaggttgcagacagtgcatgaagccacagcactcccgctcgattcctctggagtccagggaagggaaggaggctatctaccaaggagccaggactaacagcagggcaggagcagtggcagtgaggaatccggcagggtagcagtgagacacgatgagctgaaaggatgggggtcagggacaacagtcagatcttcttccactcacctcgtgagagttggtgccatgagccactctggttttgcaaactatgggttggggagagaaaagcagagagaaattagtgaggccgttcacccacaaggcaggtacttggcacgtctagaaaggaactctagctgagacacagactctggacacctggtatctgcactgagggtgacgtgtgggtagacacccccaggccaggcaggagagcacgttgacctgtgtcccctaccaggacccgtttctatggtgtgggtggaggtgggacccagggccatgtgctcatccatcctcgggtgagcttaaatccagagggcactataaacccagcccctcccctatgctggcctgcggtctacagcgcctgccctcaggtggagctgggatggtacgcactgaatgggaaagtcaagccgttcttctccagcagccgcatggtgtcatccccgcacaggctcgtgagctccatgaagggtggcgagcagatcctgtcgtctagggcagaagggaggcctggtcagcacagctcctgggcagccgccccaggtgcacgtcctgtgacagcccgccccaccccaggggccttcagtgcccccacgctcctggatctgaccgtccccaacctctgcagtcccatgtgctcgtgtgtgtgaacaataaccacagccctgccgttacattgtctaataacatttctgtaattacaaaactcgtgtatgatcactgtgtaaaatccgaagagtacagaaaagtaaaaaatgtacatattgacaagacattacaactactaccccaccactgtggacttttacccacgcgtacatttacacgcagagagctgtacaaattttgtaacctgaatcctaacttcataagccatgaccattttttctggttcaataaagactttcccaccatgtgatacactggcttaataataatcgcagtgacaatatagctcttagcatgcgtctggcgctgtaccgagggctttgccggcatcacctccacagtttgcaaaataatcccatgaggaggaaactggggtcagagagattaaagaactagctggtggtgacacaactgtttccacatggacactgcctgacccctcacctgcagactacttaacataattgagggcattgtgtggagctccagaggtggcctccccaccacgctcactgcatctctgctgcatgctccagcccaggccgcgcctggtccccctgccaattcctcctcgcccttcacagcttggcattcctgggcccctctccaggcccacccagtggattctaagagtgagtccaacttcctaaaaccctcaaaagctgacctgttctgttcatcctgactcgtgcctggcaccgagcaggggtaaactgattttttgtgggataacaaaatgtatttggaatctctctgctgatgatgaaattactggtttgttattattgtttcttgtcattgtcccccttccctgataagaccacaaaggtgggaccaccctgtacttcagggcacaggggccaggaaaggctgagtgtgagcggggcgggggcggtctgccacccacaggcttggaaaccaaaccaaaagtaaacagagcaaagcagactgtctcgagctgctagctacttggctggctaggaggtcaggacattaaatcaaggtagatccagcctcatttatgtcataaaaacaaatgccaagaattacacagggcatataaaattgcttttatctccctcctcatcctcattcccccgttccccgactcctaccctcacagtctaaactccaaacagaaagatttggggggttgcagtttctctggggcactgggagggtggtctggagccagtgtttcctgagcccctggcagacagtgttgcaggccctctgcacagaggcctgttcaatcccaagcggtccctgacagtgtccagaaacaggccccaaggtcatacagtggtcaacggcagagccaggacaaggagccaggctcacctggcagcacaggagaggggaagtcaggaaagtcagggtggggagggaggggagctggtgctcagctgaaagccattttccaaacaaggccccaggcagggcgggaatgctgtgagggctggcaggccctccatggctgtcaagggaggaagcagtctgagcaaaagcctcctcgctgcaaacacaccgcccctgcaacccagtcccaaaggatatggtgctcaggcctgaatttaaactggagggttctgccataggcaggcttcggacgggcgctcaccagcctgggctccacccttggcccctcctcccacaggaagatttggaggctgctggggtcaaacaggccacctcctggaagagcttccagactccctgtggccccccggagtttttagagcaggtgaatcagcttggctttcagatttcaatgccctcctcaactgtccctccccaccctggcccatccaagcttttacataatgtcactagtggccagtagccaatgtctcaaaacactgcatgtgttccatgccagaaactgttcaacgtagttacacagtaactcatttaccctcataagaaccccacaaggaagcactcctgtcccctgagaattttacagatgaggaaactagggcacagaggtggcatttccctgcatagagttccatggtgagccagtggtacagccaggaggtcatacccagaccatctgactcccaggcccctgctgttgactacagcctccctcgcagaaaaagtgcccatggagctccctggctcagggggttcctgacagcatgctactctgctctgtggcaaacctcataacaatagcagtgtcaacacacagaatcaaccaaggcaatacaccatatcaatagaggacaaaaaccacatgatcatctcaatggatgcagaaaaagcatttgaaaaaatctaaaaccctttcatggcaagaacactccacaaactaggaaaataagggagcttcttcaaccttctagaaaaacccagactccccagtgaaagactagacacttcccctaagaccaggaacaagataaggaggtctgctcttgccacttctatttaacactgtactggaggttctagccacggccattaggcaagaaaaatgaaacagcatacagagtggaagggaagaagtgaaaccatctctacttgcagataataggatcttatacatagaaaatcccaaggaatgcacatatttaaaaaacctccaaaactattagagctaataaatgagtttagcaaggttgcaggatacaagatcaatatatgataagcaactgtacttttttaatttttaaaaattatatttatgggtctggcatggtggctcacgcctgtaatcccagcactttgggaggccaaagcaggcggatcacctgaggttgggagttcaagaccagcctgatcaacatggagaaaacccgtctctactaaaaatacaaaattagccaggcgtggtggtgcacgcctgtaatcccagctactcaggaggccgaggcaggagaatcgcttgaatgcaggaggtggaggttgacgtgagccaagatcgcgccattgcattccagcctgggcaacaagagcgaaactccatatcaaaaaaagagaaaattatgtatgtgtattttagacagggtctcactcagttgcctaagctagagtgcagtggcacgatcacagctcactgtagcctcaaactcccaggctcaagggatcttccccgctcagccttctgagtaactgcaccaccatacccaactaattggtagagatgggggtctcactatgttgcccagacttgtctcaaactccttggctcaagtgattgtcccgcctcagcctcccaaagtgctgggattacaggtgtgagctaccatgcctggcctcaactgtatttctataccccagcaatgaacaatccaaacatgaaattaagaaaacaattccatttataaaagcatcaaaaagaaataaatttaaaaaataagtgtaagacttaaacactgaaaactgcaaaataccattgaaagaaattaaagaagacttcaataaatggaaagacacacaaggctcattaataggagatttaatattgttaagtgggcaatactcccaaattgatctatagactcaatatgatagccatcaaaactacagctttttctttgcaggaaatgacaagctggtcctaaaattcctatgaaaatgcaagagactcaggaccactaaaatatctggaaaaagaaaaacaaagttggaggactcacacttcctcaatacgaaacttactacaaagctacagtaattgaggcaatgtggtaccagcctaaggacagacatacagatcaatggaatagaacagagaatctggaaataaacttgtgcatctatgctcaactgattttctacaagggtgccaagacaattcaaggggcggaaagaatattcgtttcaacaaatggtgcttggacaactggatattcacatgcaaaagaatgaagatggaaccctacttcacatcgtatacaaaattaattcaaaactgatcatgatctcattataacagctagaactacaaaactttaaaagaaaacatagatgtgaaccttcatgaccgtgcattaggcaatggcttcttagacaggacactaaaagcaaaagcaacccaaggaaaaatagaattgggcatcatcaaaatttaaaatgttttgcttcaaagagcactataaagaaaacataaagacaacccacagaatgggggaaatatttgcaaatcatgagaagcgtctagtatccgaaatatataaaacactatcaacaactgaacaattaaaaagatatctctatttaaaaatgggcaaaggatttgaatagaaagttctcaaaacaagacatataaatggccaataagcaccttattagccatcggggaaatgcaaatcaaaaccacaatgagacaccactttacacctaccaggatgactataataaaagagaccaaaaataacaagtgttgctgagggtatggaaaaaattccaaccctcatacattgctggtgggaatagagaaatggtacagaagcttgggaaacagtctggcagtttttcaaacagttaaacagagtgaccatatgatccagcaattccacttcttatacccaagagaatggaaacatatgtccgcataaaatcctaaaaatggttcacagcagcattactcatcatagtccaaatggggcaacaatccagaagtccatcaactgcagaaggaataaacaaaatgtgacctacccatacaatggaatattattcagccatgaaaaggaacaaagtattgagacatgctacaacatggaagaaccataaaaacactgggctaagtggaagaagccagacacagaagaccacatactgtaagattccatttatctgaaatgtccagaacacgcacatccatggagacaaaaaaagagattaatggttgacaggagctggggaaggaaggaactgggagggactgcaaatgggtacattcctttgggggtgatgaaaatgttctagaattagtagtgatgaccgcacaattttgtgaatataatcaaaactacagaactagatgtacacttaaaaaaggtaaatttggctgggcatggtggctcacaactgtaatcccagcactttgggaggccgaggtgggccgatcacctgaagtcaggagtttgagaccagcctggccaacatggtgaaaccctgtctctactaaaaatacaagaattagctgggtgtggtggcacatgtctgtaatcccagcgactcggggaggctgaggaaggagaatcctttgaacccgggaggcggaggttgcagtgagccaagatcgcgtcactgcactccagcctggtaacagagcgagactctgtctcaaaaaaaaaatagaaaggtaaatgtatgatacataaattgtatcaatacattaaggggaaaaaaaacctagtagcagtagctgtcatccagagtgcttgccctctgcaggacactgggctaagtaaatgcttcacaaccacggtctcctccagtcctccctacacacgcattgagtcttgttcctcatccccactgggtctgaggtgaagtcagagaaggaacaaggggagcccatcttcctccagagatgtctggagtccagacgaaatgcaagaacaagacattttcaaagaatgggccacatccagcatcaggccagacacccccacccttctgaaatcccaggctctgttaagacagcagcctaggtgggagcaggaattgggtggccaggaaaggtctgcacggtcattcttgttcattcgtcccaggctggagcttgctgaccacactctgagcggcagacacaccggctgcctggaccactcctgctctggcgtggggtggggactcaactgagactcgcccagccacactgctaggatgagctcgtattccaagcttgggcaccagcctttgctgaaggcagtcttgagcccacagagcacatgctgggaaggaccccatctctcagtggacacagactgttttgcatcccgagctgcccccgctcgggttgctgggcatgacaggctgctatgtctgcaccgcttgagtcagtttctggtagccaaaagcatcccgacacacccatgaagtgagagtaaataagaaacgtagagtactactgttccaataaccattcaccaacagaaaaacatgttgagcctctactagatgccaggagctaacaatatagtaataaataaaacagaggcatccctgtcctcgaggagcttacattctagtggaagggacccagacaataatccagagagataaatgaaatgtatagctggccggagctggcagggaaacattaaccacaaaatgggggtgccggcagaggtggggtatgcgatttgaacaacatggtgaggggcaccttccaaagactgggggggtggggaggcgccaacgaggcacagggaacagccggtgcaaaggcccaacctgctgctcttaggatgtatgaactggacccaacctgagaacgctccagctgagtgggaggctgggaaggaaccaggcccagctgtcttcactggcaggtggcgcccaggtgcacccccaccatctcagtaccagcagacaagccccttctgcctgcctgagggacagcgacagcaggggttcctccctctcgatcacgagaagctcgcagtggtggcgccagcagctcttctcccagaatagagacagaatgaagacttgggaagtcagagcggggagcccgggaggctatttctggttccctgaaaaaggcgactgttgcttatttctctgccatccttatttttggatgggaggtggaatgaggctttctttggttggatggtgggttgtgttcttttgagagcgaatatcagcccctgggaaacggaaatgctcccgtcttccctctctgcctttccaaatcagacaccatgaagcgggagggcacgtggagatgggcaagtcccagccacaggcttccacaagtccagaaaggggaaggaactagttcaaggccacacgagttaccagcagagccagaaaaaggctggcctcccgcgtcacacctcattacccatccactccaccaggtgacctttccctcatccgaccggtagcagctacagaacttacaagaaaacaaaagttcagtgacaaacaggtggacccgagaggacaacaggggtggagggaggaggaaatgagcacctgaaggggcagttttgaagccagccagcccgacgctggacctggggcaaacttccactagctgaaaccttgggcacacgacttaactctgctgagccttgctttcctctctataaaatgggagtgttgcttccctagagagctgctgggaggcctggcacacgacaggcacccagcgggggatgccctcaggggaggaggcaggtgtcaaacagtggttactggtccacatcccagggcgcccctgcacgtgggagaccccagctatgtgtgcctccgacaccggctcttagagctgcgctcagtcctgcttcctgggccactcccggttcctaggggcccatattatatggcaggaaactggggcaagaggggccccattgtgttgctgatagagcagggcactggggacaggatcagcaggatctaagttctcgcagcatcatttttttttttttttgagacggagtctcgctctgtcgcccaggctggagtgcagtggcgcgatctctgctcactgcaagctctgccttccaggttcacaacattctgcctcagcctcccaagtagctgggactacaggtacccaccaccatgtctggctaattttttcatatttttttagtagagatggggtttcaccgtgttagccaggatggtctcgatctcctgaccccgtgatccgcccgcctcggcctcccaaagtgctgggattacaggcatgagccaccgggccagccttacagcatcttttgaaagtgggggttggagtgaaacccacccccggacttctcaggccccagggcagctatctcagccccacacgccctttctttcccctcccagcaccaacccatggcctggaagactcctgcttatcctccaacatgggtcaggcaccctcttcctgctcacctgggagcagcccccttgctgtgccacccaagggccccacgctgctcatcttggccaactaatgaagcatccacctcccccacccgactgggcactctgcaggatccacagaggacctgggctgtctgggttttaatcctggctccatcttatatcagccgtatgaccctggccaagaaattttgctttgttttgtctcagttacctcactatgcctcagtttccttgctgtaaaatgaggactagaacagcatctggttcagagggctactacccctcccccactcatcgtcgtggtcccactgccctcactcagaggtggccagcatccagcagatgctgaggatgggcctcatgtttaaaccctggcactagcaggtgtgcatgaaaaactcgccgtactattgtcgtcatcacctggaccgtcatacgcaaggtctgctggggagggtccaagaagtaggtcaaatgtcagtaacacgccaaggaacaggggcacccagcactgatgccacaatgcccagggccagggaagccagggacactgcagggaggaagctgtcatggcagggaaagcccaggaagcaaaaggagggccagcccagttgccatgactgggaccgccaatgctctgatctgatatctgtaaactaggccagtgatgccgcccacctcccggggtggttgcagggacgcggtgaggccacgcccatgaggggcattcggaatgactgagaatcgtattgtccagccctgtttccatggatgcccaccctcctcggggtgcctggtacccaccagcacagcacccccagcctgctctggcctgccctcctgggacactgatggaacaagggctgtggcccagcaccgcgacctcttcccagctcctggaatcgatgttcctgaagtctgttaatccaggaagccccttgttggtcccctcactccataatcatcatctccacacacaagatcctctgcccacaaaccaccgtcctacagctctcacctgtactgagacagctcccagcaaggcgtccatgccccgcgagtgaagcccacagcctttccaggcctccgcagcctgactctgtaccttcctgtgatgggctgagcgctgtttccaagttgatattgaagccccaatccccatgcctgagaacgggactgcactgggagatagggtctttaaagaggtaaaatgaagtcagtagagtgggtcctaatccaataggactggtgtccttataaggagattaggacgcagacacacacaggggaagaccatgtgcagacgtggggagatgagggccatccgcaggccaaggagggaggcctcagaagaagctaactctgccaacactaagatctgagacttctgcctccagaactgggaggcagtgcattgctgttgtttaaatgcagcactgtcatgcagcccacgcaaatgaatatacttcccaactcttttgtttgtttgtttatttgtttttctgagacagagtctcactctgtcacccaggttggagtgcagaggcatcgtgatctcagctcactgcaacctccccctcccggttcaagcaattctcctgcctcagcctcccaagtagctgggattacaggaacacgccaccatgcctggctaatttttttgtctttagtagagacggggttttgccatgttggccaggctggtcttgaactccggacctcaagtgatctgcccgcctcggcctccaaaagtgttgggattacaggcatgagccaccgcgcccaactcttctctgaccgcacaacccaagatcgttcccagccaaacccttgtgccaggtggatatactgtccccactatatctctgggatggtccccgttccatgcctcacttggcaacacctgctcttccaagcatcacagaatcccagctgttctgcagagcccccaagaacacgctgtcccatgctgctgcctcgagtggcattcaccctgcaactcctacccacagtcacgtctttctagtactttttctggcactgctaccgagttttgttgtttacctcttgtacgctattaaattttcatatatgggttctgattcagtaactaggcagtatgttccttggggacaggagaaggcaggcctcagtaagaaccatctctctggcacatgtgcacgtgtgaagataagttgatggatgggataagtgagccgtaagcactggaaacaaaaggaggagggaagcccagtgttggcacagcctgcaaaggaaggaggaggggcctgcaatctcccgcctggccaccctgtggcgctgtgggtctggaacagccttgaagatggctgtggcaggactggaaagagcctggccggcccatctgtaagttcaagtgctctggactcattcaggccctggactcatccaaagtcaccttccctctgtggttatgcagttaaggggcgggagtcacatgctcttgaattctagacagggaagatgttctgtgcatccgggtgaaccaagttccagcctgacagcagctctggaaacaacccaaatggctttttggccagcgatgacgatggcagccacccagtaacacccacagtcaactcacaggcacgtgggtgggagggccgcacaggcctgagccaggagggggatgccaggaagggcccgggtgagaggccccgggatgcaagcgacagagagacagaggtggtcccaatctgaagggacttagagccagaagagaggggctggatgcaccctcaccaccacagcacaaggtcctgtccacgtggcctggctggagggctccaggcattccatcctagaaagccatgtgccttgcccgcaggcagggcccctccatgcccctctggggtgcctgactgcctaggcccccaccctgccctcctgcagattggcagagcaccagatccctctggctatgctgaggagctgcccttgccctgtgcctccagggtacatccctaacacctccgaactgtccctctcgcttaggatgagtgactcatctctccctgaagttgggggcccctggagggtggggcccctgcaggggctggcactgagcagggctggatttgtaggggatttgggcgcttccgaaaggatggaaacaattggatggcagtgacatcatcgtgtgttaaaggtctatgaacagtcctggatgagataaaactggaatgacatgttgtgttttgtttgtgaagacattaaaagttccagatcctgaagctggcatgccctggggatgcaggacaaacagcctggctcctggaagccacctgaaaatctatgacagccctgcctggctcctaggagcagtggaccctcagcctcgcagccccttgtagctaatgcagcaacctcaagggccttgggcaggccaggcatgtgcagcgatgcatacatgtaggacacagagctacgagcccaggttccaatccaaggtgcacagtctcaggagctccccaggagctagcatctctcatgggcatcgggcgtaaggacacagtggccctctcaggtgccctcgtgggacaagggaggagagaaggcacttcccgtgctgcttaggcactgaggaactcagagctgaaggcactcaaggccaatggcaaaaggcccatggggcctgggtcactgaaaggcagcctggagtgagtcttccccagcaggactgggtgctgcccagccgtccggttcactgaggaaaggaagggtcacatgaggactgtggtcacaggaggagcgggggtgtgagagaaggccaggcccttgccacatggactaagcagtgacttcacagcttcagggcacaggggctagggcaggactgtgtctcctcccttggacccaccatgaggagagggtagggaagtggcatctcctgagtgttggcatgcctcatgctgttgcgagggggcaagggagaactcgggaggtgtgacctgtaaagcccagcctaaggctgagccgctgctccatgctccccaacggctcccatggccttcggaatcaggtccagactccttgccagccttgaagtcctccatggccaagggcctgcctatgcctccctcctcccaagctctgggcaaaatgagccttgctcggtttctcaatcaagctccgccacagggtgcaggctcagtgccccaggcagtgcccctgacccagtacccagttcctccgacattaaggcttcttgggtgcccctgccccagtacgcagttccttcctccctgatggaggcagatgaggcaggaggctcggtgggagcagggactatgcctgccttgctcatctctgtgtgcctgggacctgccctagagcctagaacacagcaggcctgccatggtgggacgcttaattcttgtcagcttgactgggccacagggttcccacatatttggttaacattgttctccgtgtacctgaatgagattagcatttgaattggtaaactgagtcaagcagactactttccccaatgtgggtggagcctgtccaatcagtcaaaggcctgaatagaacaaaaggaagggtaagaaagaattcactcacttggcctccctgttcaagctgggacatcagtctcctgcagtagaaccataaattatagcatcagctctcctggtcctcaggcctttggacttggactatgatatggtttggctgtgtccccacccaaatctcatcatccccatgtcatgggagggagccggtgggaggtaattgaatcatggaggcggttacttccatgctgtctcatgatagtcagttcccacaagatctgatggctttataaggggctccccccatgctcccctgcttcattctgcacttctccttgctgctgccatgtgaagaagggcatgtttgcttccccttccaccatgattgtaagtttcctaaggcctccctggccctgcaaactgtgagtcaattaaacctctttcctttataaatgacacagtcttgggtatgtccttatagcagtgtgagaatgacctaatacagactataacttacaccaccagctctcctaggtctcaagtctccagttagcagatagcagattgtgggacttctcagtctctatttcttacatgcttctttccattatgaagtagaccctaaatgctgttcccttgaatgtgaactggccctagagcctcacagataaatagaatatggactctggaagcaaggccagagaggctgtctttctcgggacacacccctgggtccctgagctgccaagtcagtagtctggctactctgtcaccatcatgctaaactgccatgcaagactgcatgggagaaccacccagctgagcccagccaagctgcagattcatgagcacaagaaacaccattatcattttggatttccatctaacagacaaccaaaatgaaggctcatagagatgacatgtgttgggcacttaacacagcatatgcagggcttaatgtcaacaataaccagacaagcaatgcagtgtgctctgcgccatcaacaagcacttgcaggcatcaacttgtgtcatctttatagcaatgccatagcacggatcactatcaccactccattttgcatgtgagaagcagaggccctgagttggttgcacgttcaagatcaaagccagcatgtggcgggaaagaatacccttgactgctgggcaaaccactgcataatagcctttgtcactggtctccagtctcatcattcccacttaagaacactgagtctggaaagagttaaggaaggctcctttcccacttcagggaccaggaaacagaggcactgggccagctgtgcttcccaaacactgtagccagtcccagaagctgcctggctgaatgctccatactgtgtgaacttgagacggttacttcaccttttggtgccttcatttcctgatctgtaaaatggcaataagagcagtcctgctcataggattgctgtaaggatcaaacaggttaacacacaaagcacttaaaacagaaaccagcatgcagaagacaccaagtgtcagatcccaacatcctgtccatcattatcgtcatcatcatcactggtattactatttgaaggtctgccatttaaaaccatccaagatcaccttacagagcctatcactgctctgcagtctgacatggccctgggggaggcaggggagaaagaagagtagagaatactggaggagtgacatgtttgcttcctcctgcccaaagatggaactcttgacccttaggcattaaggaaggtgcagccttctcgtccatctacctaccatgacagaactcgaactcagatcagcagcaaacttctaagccagccgacgtggtttggctctctgtctgcacccaaatctcatgttgaattgtaattcccagcatcgggggaggacctggtgaaaggtgactagatcatgggggtggatttccccctcgctgttctcatgacatgagtgagttctctcgagatctggttgcttaaaagggtgtagcacttcatccttctttctctctgtcttgtcaccatgtgaaggtgtgcctgcttccctttcaccttccaccatcattgtaagtttcctgaggcctcaccagccatgccttctgtatagcctgtggaaccgggagtcaactaaaactcttttcttcataaattacccagtcacaggtagttctttatagcaatgttaagaacaaactaatacagaaaaatggtaccagagaagtggggcactgctataaggatatctgaaaatgtggaagcaactttggaactagataacgggcagagtttggaacagtttggagggctcagaagaagataggaaggtgagggaaagtttggaacttcccagagacttgtggaatggttgtgaccaaaatgctgatagtgctatgaacagtgaagtccaggctgagtaggtctcagatggagatgaggaacttactggaaactggagtaaatgacattcttcttatgctttagcaaagagactggcatattgtgtccctgctctagagatctgtggaactttgaacttgagagagatggtttagggtatctggtggaagaaatttctaagtaacaaagcattcaagacgtggactggctgcttctaaaagcctatgctcatctgcaaaaacaaagaaatgaccagaaactagaacttatatttaaaagggaagcagagcataaaagtgaaaaatttgcaggctgaccacgtggtagaaaagaaaaacccattttctgaggaggaactcaaagctgcagaaatttgcataagaagccctgaaggctaatagccaagacaataggggaaaatgcctccagggcatttcagagaccttcacagcagtccctcccatcacaggccaggaggtctagaagggaaaaattgttttgtgggctgggctcagggccctgctgctccatgcagcctcaggacatggcatcctgcatcccagctgctccagctccagcagtggctaaaaggggccaaggtacagcttcagagggtgcaatccccaagccttggtggcttccacatggtgttgggcctgcaggtgtgctgaaggcaagattttagcctctgcctagatttcagaggatgtatggaaacacctggatgtccagacagaagtctgctgcaagggtggagccctcatggaaaacctctgctagggcagtgcagagagtaaatgtgatgttagagaccccacaggagcactgcctaggggagctgtgagaagagagccaccatcctccagatcccagaatgacagatccaccgagagcttatactgtgtccctggaaaagctgtaggtactcagtgtcagcccacgaaagcagctgtgagggctgtaccctgcagagccacaggggtggagctgcccaagtcttgtgagcccatcctttgcatcagtgtggcctggatgtgagacatggagtcaaaggacattattttggagctttaagatttaatgactgccctgctgggttttggacttgcatggggactgcagtccctgtagttcttgtttgggctaatttctccctcttggaattgggtctgtttaaccaatgactgtaccctcattgtatcttggaagtaactaacttgtttttgattttacaggcttataggcagaagggacttgccttgtctcagatgagactttggactgggacttttgagttaatgctggaatgagttaagactttggggggctgttgggaaggcatgattgtgttttgaaatgtgagaaggacatgaggtttgggaggggccagggtggaatgatatggtttggctctgtgtccccacccaaatctcatgtcaaattgtaattcccaatttgggggagggacctggtgggaggtgattggatcatggaagcagatttccctctagctgttcatgtgatagtaagttctcatgaaatctagcatgtcgcacttccccttttgctctgtttctctctcctgctgccacgtaaagacatgcctacttcccctttgccttccgccatgattgtaagtttcctgaggcctccctggccatattttttgtacagcctgcaaaaccgtgagtcaattaaacctcttcataatttcttcataaattacccactctcaggtaggttttttttaatcccttttttttttttggagacagagtctcactctgtcactcaggctggtatgcagtgtgtgatctcagctcactgcagcctcagcctcctaagtagctgtgattacaggcgcacatcaccacgcctggctaatttttgtatttttagtagagacggggttttcccatgttggccaggctggtctggaactcctgacgtcaaacgatccacccgcctcagcctctcaaagtgctgggtttacaggtgtgagccaccatgacaggcctcaagtagttatttatagcagtgtgataacagactatacaccagccccagaggagcactgaggcctggatcatctttgggcagaacacacagcttcgatgcaggatcctcgtgtttaaaatacaaggctggatctggggctgtcagttgccagaacaagtccagagaaaacacaaagagaacaccacccagccctgacaatgttcttggctgagccagagcccctgaggcagccgagtgaactccatgacagaaacttctctgaaggcttgagaggaggggagaaaggtggagggctctggcccatgacaaggccaacaagtccactccaagccaggtggagggggcctgtaccaccccatgccccaaaacaagaaaggctctcaccaagagggaccatctctattcctggtgataacttggcctttcttacctgcctggcctttgtctgtgctgtatctgccactggaatgccctcccttctcatctctgcctgttgaaatggaatctttatcactgaagccctgggatttggcccaggctggggacttattactattgggggcctacaaagggtccctctctcatagtttgtttgtttatttgtttgttttgagatggagtctcactctgttgcccaggctagagtgcagtggtgcgatcttggttcactataacctccgcctcccaggttcaagcaattctcctgcttcagcctcccaagttcaagcaattctcctgcctcagcctccgaagtagctgggactacaggcacgtgccaccatgcccagctaatttttgtatttttagtagaaacaaggtttcactatattggtcaggctggtcttgagctcttgacctcaggtgatccacccaccttggcctcccaaaatgctgggattacaggcatgagccaccgcacccggcctctcttgtagtttttcttggccgccgtggagacacctggcccacccttggagccccccagcactgtcctgccctgtggagctggcacacagattgtggttatggcttgtcctgtgtttccttctccttaactcatcccagataataatgcctgccctgatgcctgccaatgttccccctcaatttctggcctccatcctatttcttcctgaccagagtcaccaccctcatcacaccctcagcatcttttccagaagccacagcagcctcccaatggcctccctctctccccgcataggctaagcagaaactggccctggaggccctctgggcctcggcatggggctctctcccgcagcaccaatagcccccatttctcctgaacatcctgctccctctccctggaatggctcccaccttcctctaattgagcccagtatttcagagccgctccaaataccacctccgcgagagccccacagacaaccaggaccaccccttcctgtggccccgagcccatgaccccacctgccccaggcctatctcccatgggagtgggatttctgctcagagcctcccccagtgcatctccttcttatgtatctgattcttgaaaacattcttccctcctttgcatacttattgagcaggtactatgttccaggccctgacctgtcatggtccccaaagacacactcgcccctgtcctcaaggctgtcacggtcaggtggggaagacagcggccagcagacaatgacgaaacagtggaatgaatgtgcgatgagggcagcaaagggtctgtgagtagggaggaaggcactgaggcccacgcagggaagggagtgtgcagcacagagggcttctgggaggaagtggcctgagccaaaccccaaagttggagttagtcctggggaccaagagtattccagataggcagaacaccatggacaaaggccaagggtcaagaggggtgcccctggggttcggcttggctgcagtgtggagtgcaggggcagtatgacaggagacgccacccaggagagggaatgggcaggggcgacatgccccaagacacccagcacaggtgacagggcctggagagatgcaatgatagcaattaaattccattgaacttataagtatgcaagggaaaaccattgtattactcagtgtggcaggcagaatctaagtcaaccccaagatccctgtggccgggcaacaccctgcatgatcgccagaactgcatgcatgatggatgggttctcctctgtgactcggttctgttgcattgctgccctcaaaacagggagatggtctgggtaactcttagggcatcacacacagagcttcttctctgaagaggaagctggagattcaaagcacaaggagactggccagctgtggccgccttgcaagtagaggggcaccgtgagaagaaacacaggacctgtaggagctgctggccagcaagggtggggacctcagtcctacagccaccaggaactggattctgtcaatgagagttagcttggaggtggatgtttcctcagggcctccagaagatcacctgcccctgcggacaccttgatttcagcccgtgacaccctgggccaagagcccaaccacaccatgcgggcttctgacccacccacccatgagataataaatgggtactgtcagaagccactcaatctgctgtcatctgtcatgcagcaataggaaattaacacatccagctactatgagctttcaagggggaaacgcaattgtgatatttggagtcactgggggaaagcagggggcatttcgccagtggccacagccccctaccctgctccttgaaggcatctaagagaccctatggccttaccacaggtgcaacctccctgctagcagctagatcctcacttagctacctggtgacaggcaagctgtggagagaaaacactggaggacgagaagagaagacaacaaatgccacaggtgcaaagttacagtccaatacagcaagccacgggcaggggaagagcaggtttcctcccacctgacttagctagtgactcatttcatcttatgtgaccagagagctgtttgcaaccacaatgtccaaagcccaggagaagaggagccagacactggctcagacagagacaggcatttctgcgcccgatgtctgagtctggcggcagtagctggaaacgtgggtagactctgtggcagctgctcccactgatttacagccccttctggacccaggcagacgctcactgtccctgctcagctccagctcccgctcccaaaacatggcagccttttttactttcaagacatttttaaaatgtttggagggctctttctggtagtacctattctaaaagcaaaacatcttagcttggacccagagcaaagatgacgcttacattcatgaacccgtccacaatttttaacaatgggacaattttcttcatacaaaaagggatctaattaatcaacaagcccaacaactcaactaaaaaataggcaaacaacaggcaaagattcattcatagaagacaagcaaatggagccagtgaatccatgatgggatactcaattgtgccaataacgacaaacacacatcaatcgaggtgggtacggcttccccaggcagactggcaccatcaggagtgaaatttgctcaaactttttgaagggcaatccagtgagatctgccaaagtgaggaatgtttataatctttggctgagaaatcccacttctagggattaattatgcagaaatatgcagggagctgtttactgcagcccagtttgtttaaaaaaaaaaaatccaaacaagactggaatgaccttatgggcccaacataaattaggattcattcattcatgtatggaaatattatgctgccagcaaaaggggcagacctgatccccctcatcttcatgggctaacatggaaagaagcgaagcaagacacatgttcagtggggacaaagagctgtatcaggacacgtgtaaaatgaccctgtttctaaatgtacacattgcactagagcctactgtaatgaaaaaataatactaaaagtgcacatgtatctctacatgtatgaataggaagggtctagaaagataagttccaaactatgaacagtggctgcctcagggaagtgaggctggagttaaacagattcgagaagcaccagcaatgagggccccacacactaatacagggaactcaagaacagacctgtgcagggccggaagtgagggcggccagaaggcacccagtcagggaattcctgagtgtgttgagtgcaacagtctctcaagagaagcctcaaagagaggaggggactctatagttaactggatggaaaaggctaaattctgcagaacttcactgattctatggcatgtttttcatattttccatctctgaaattgagatgtgtctcataattgatatttcacaacttacttaggatttttttcttttttatagaatatgaagtatcagtgcatcttacaatcggtaatgaaattcaacactgcccccagactaaagattcatattaacacattactaaggctctgagaagtcctgcagcaaagaaacatgtaatcctgattctccaacatatctgacacttttctcttttccttattttgcctttccctttgttcacacgtgagattatgctgacactccacaaggtgccacctggtgccctgtggatgtctgcaaagctgcaaggggatcctgtcacttctagggcaactggggtggttgggacacagttcttataattctgtatgatgactgttcggtaaataccacagtaacaatggcaacacccatccacggatgctacaagagaagggcaaacatatgagagacagtctgcaaagaatcctcttagaaggttcttgccaactacaaaggaaaaaatagaaatttagagtggaaaagcctggtggactttaaccaaataactgctgctgagcagacagaagacatcgttgtcctcatgcacctcctgatatgacgcactagggagggactggcactgctgggtggtgttcctgctgaaaatgtatgaccttgacccagtcacgaaaacaccagataaacctgaattgagagacactccacaaaataaacagtcaaggttccaaagtgtcaaggtcaaaacctgaggctccatcccagatggcaggagaccacagagagcgacaaccagattggatcctggactaaaaaatgggtattagtgggacaactggggaaattcgaattcatttaggtctttcaattattgaatagttatcaatgtgaacttcctggtttagataattatggtcagataggatgttaacactggaggaagctgtgcaaagggtatatgggaactctgtgtactatctttgcaactctgtcaaaatttcttaaaaataaaaattacactaaacaaacctgtgcaatgtgaactttattataataaatctacaatacatcatctagtagccaataaagagatttttaaaagcccgcttgtgttacatgattggtcaccctgaagacactcttgtttggggaaataaacccaggtacacatttgcaaacacggggctgggcgtttgggcagaatggacagaggggagcaaatgcctggcagggtctggtctcatgggggtcactgcaagcctaccatcagggcgccaggggctgctgcctttagcactaaatgcaagttgagaaacacaggactcacagggtcacagcacacagggtgtggtctgaaactcacaatgcactgtctgccaggagagctcccatctattgaggaatccttacaacaacctatgaggaaggtgccaccaacattacctccctccccattttacagataggaaagctggggctcaatgcagttaaataacctgcctaaatgcacacagctgggtgtttaggagaggatctgaacccaggcagtctgactttagattcactatggcgctgcttctgaaaagacccctgcagagatgtgggtcccatggagacagcactggactgagagtcggaaaggtgctgagtggtcctgggtcagccatgcaaccactctgggcctctattctcattgttgaggatgtggagaagagcagtttttgtagggcttccagaactcaagatctctttcagctggaaaaacactaagtgagctataaattcacactaaagtgtaaatggctgctgttggataccttctgaccaatctgaccaacaaggaggttttgagtacccatgtaccctgcttatatcccaggggagccaggagactcagtgtgagtagggggaagaaagcctgggagtggagtctggagggagttagtcaacacagccaggggaaaggaattttgggtgagagccagagtcccaaagacaaacagtctgttcaccaactggcctaggatcagcagcagtgccctagaaaagtgatcggagccagctgatgtcattgggagagtacctcctagaggaggggtgcctgtgggttgagaggggacagaggttttcagaaagctctgcaggaaggcctggggcaggcccacctggaccaagtggggtatctcgtccagaagccactgagctggagggcgctggaggggttggtgggctgtgggtggaggggccttcttgttttgctggggagcgggtccctgccatggtcttaaaggctcagcaaggttaagctctgagtgaacagacaggaacattcttccctagatgaaggtgcatctctcctgcagggtgccagccagtcgccatgagagctcagtccactcctttgagtctctcctgggagcctccagaccagtgccctgggcaggagggacagagggcagcaaatgcctggcagggtctgttctcatgggggtcactgcaagcctaccatcaggatgccaggggctgctgccctgtccacagtgcccacagctgtggaaatgaggagcttggcagagaatccagcatctgtttcatctctgccagtgcccttaggaggcctggacctgacaacctctccaggaaaagctgatccaggctcccgggccactgtcctccaggcacataccccagtcctggtgggacaaaggggtgaggctgctggagggagagtggggaagctctcactactctccagggacccctgctgcagctaggccagggaagaggagatggcacagaaagggctgcgagtaggcctgtgggcctgatgtggagctggctttggctgtgggggtgcaggaaaggggacggggcagtgtgaatgtgggggcgtgctccctgaggccctgtcctgccctgaacatccctggcctctgctgcctcaactgagagcccggccagcaggactgatgcttccgagattcccaggtcctgggggctgacagggtcttgtcttagaatgtgaatgtctggatggctgcacaggtggcccctggctccagaggacaggagcagaacccacagaagggtcagccaagggcagggagatgggagggattctgagaatcagctgtaaaatagatgtttgttgtaagggaacagggtgagctttggcatcaacatggagctcagcttgaagatgcaccagctctgaaacctcaactaagttaccataacctctctaaggttccacaccccccatctgtaaagggggaacgctacagctgagggaaggagcagcttcaaggacaggaggagccacccttgcaggccagacctggttccacatgctctggggcaccatttcttcctcaccccatgactcccggactgggggagggcactggcttccacacggcagacgccaggacggcagctcacgcagactcagaccagggctagccttggtcccagctgccgcctcatgccggcaacgcacctacccggcctggtctgcagctggcgcttagccgccccagggcaggggagccacaagcacaatcctgctctgcggagcctcccctgcactgaaagggcgggtctcagcctgggtggcagacaacagccgatgtgaaaacaaaaacagtggtgctcccacacatccctgaagtccaagaaagggaaccacaaaccaagcacctcccctgagagaccctacctccctggcaccctgtcctccctcattccagacccttcgatggggcacgctgtcccctcacctcagccctgtggtctgggcaggctgacactgggggaggcatgggcaggtgcacaccaaggggtcgctctgcccgatctggggtggggccaccagctgagacgcccactcagcacgtccgaggcactggcgacccacttcccagatgagtgaacaactcaggggagagtgactggcccagccccccgaggggctaagattggaagccttatcagcgacaaggtccttctttcctgccatgatgtgtggctgccctcaagtatcatttcctggaccccagagggcacccccagggatgatggccatgccaccagcaccaggtgagcctaggcaggactcacctgcaggcgcagagccccatccctacctatctttgcctcggtccctctccatcagccacaggggaactgggggtgtggaaggggtacacacaggggtgagggacagggcttgggaaccactggctaagagcagacccacactgtgtggattctgatcccaaatctgccccactagctctgtgacctcaagtaacttaagatcaaagcccctcagtatcctcacctctaaatcggagatgaaatcagaaccttcctcatagggtcattaagtggattaaattaggtactgtctgtaaagtatttaacccagtgcctggcacactaagcacctgcctaagcgctgacagacgcacagctcagagaggccacacaattggcggagggttggaggggtggcggtggcaatgggcagggtctgaggccttgactccaagtccccacccctctgcagctccccgagggttgagagccagttcctgcctctgggagcagctccccaccaatcacaaacacccacccccaaggcaaaagctttttggggaattatttctccaggctctaaggaatgttactttctctttgctttgtatccagactactcaatttcaacccaggtttcaaatggcctctaagatgagccctaattaaattcccgtaaaaccacaggcagaagcattcaatctgcggtatgcaccccccatccccagggaggcctgggatcccaaacaggccatctgtcacccccagagcagacacatgggaacttctaagagaagaagaacaggagagccacccatcaccccaaagcagtcagggctttcaaggatctctccagcctgttgcccaatggtctgagacctgctgtccctgaagacagggacacaaacccacgccatgcaattacggcccaggtgccttctcatacatggtgccttctcagccagtttgggagccagctagagccgtgcccagaatcgctcaccctagggtagcacagccatgccttggctttggggcttccatctctggaccctggccctgggtggcagagtgggctgctgatgggagaaagagcctgcaaattcaatgtttgttactgcggcctcctccctccctccccgaggcctgcaccagggaatgcttaatttctaggaagaattaagtgcttggtttgaattgaatccaggctcaacgctgcctgtgcctctgcctagggggtgcgggtgtggggagggacatgggtatgggtataggcatggctgcctcccagaagcagtcatctatgagggaaaggtagggccctggcatgctggggtgggtcattctgcaagcctccaggatgctggttgctacaaagaggggactgctgctgaggtcacaggccgaggccaaacccccagccagaggagaaattccaaggttgttctgccatgggaaagttgggtcctcaggcagggacccatgtcttggaagactgctaatgctcccctaaaactcgttctagcccttcttccatggtgataaaacccgaattgtagctgggcatgtggctgctcagaacaaggactcaatttcctgactcccttgcagcttaggatgtgactaattctggccaaagtcccttctcccagcacaaaaacatgtcactggattgctttcagaacccctccttaaaagagaactaggccttcttctcatttgcttcctttttcttgatcttcctctccatcctaatgtctagatcttggatgtgagggctggaaatacagccatcacccaggaccagatgggcagaccacagaagaataaggagctagaaggagccagggtcccagcccctgtgcccgtgctggatggccttcctctgggcttttacatcagagagaaaggaagttctgtcgcatttaagccaccatgattttaggtctgctgttaaagcaacttgaatgctaattgatacgaagtgggtgggtttgaagctgccagagccgaggcagagaaatgaccctgcttcccctccaggctctgaatgagacaagaatgagctctgggaatgtggaactgagaaggcagtgacctcacacaggctgcccggagacagcgatgctgggagctcccagcagcaggcctcatctgtctcctggatgcagagctggggtgggagaggccctccacggctgatgctctgcagggagacagacggcccacctgagcacagacccttatccaagggctctgcctgctattcctgggagagcctccccttgtgccatgtcccaactgcccacccccaccgcaaagcaggggctctggtcgtctccctcccactgctcatcaatgaggatcctagcagtcccgaagcacccacccgtcccccaccagctctgttttccctgcagctgtccagagtctctgaaaacagagcagtcttactgccggggcagggggggtgacaaccggggcagggggggtgacaaccggaggaagtctcaccaagctccttctcccagcacaaaagcgtgtcactggattgctgtgattatctgagggaacttcaagggtaattatggccatttacagtacgcctgaaagggctgagtgcctccaggaacagcaggcagttgaggaggggggcccagggtgtgcttcccaggaaggctctctgcctctgcagctggtgggggcatgcagcagggacccacccagcgatgctggtgaatggacagccactgggggtcaggaaagggctccaggaagtcccagcctctgaccgccctcctggaagaatacaagcccaggctcggcgtgcacgataaggaaaacccagcgtgcaacatttatggcccacccaccctacacttcctgctgatctagaaccaagcatgcgttagggtttggtcaacagctctccctggacctgttgaggacggggccctctcctggaacacccacagctctccccttatgggtagctcctaaactttctaatctcccagtgaactaggacacaccctgcttaaaattcctgacctgattcctaactgcctccaggagaggcccaattccaagccaggcgagcgggcaacagaggtacctcctgggccttcctctcaccatgtgacttcctacggtccacctcatcaccgggttcctgctccttgaacacaccgtgcacacacccaccctgagcccaggctcacccttgatccccagccctgggcttctactcctaaaaatctaagatggatgtgaagactcaattaggatgctggggtcctgccatcgtggtgggaacagctggagcagctgctgttcccgggtgacccagtgggccggtcccatgctaagtgctctgcagacatcatcccaggtatcctgacccctgaccccgtggctgaaccaggtatcacccatatcttccagaacaccagcagaactcaaatgactgatttgtccgagaccacgtggctaacaagagcccagacaggaacccacatgccagagcctgtgcttttggctccaaaaggcccttcagcggcacctcctcgaatcccacccaaacccatcactcttcgaatggacttgtccgggacatgagatgtggctgctggtctgccaccttcttctgctagctgggccttctcatgttctaatacagcctcctgctcttcacacaggcagtgtccaacaagcacaccttctggaaagaggctgattccctttcccaaattttaccaaaccttcacccatggcagactgagatgaaggtgaccccaggagggaacatacagctctttcttcccatctgggattctggatggatccaggaagacagtgcaaagggagatgaagtgcacagcagaggccaatcactccaggcctagcaaataaaggctgctggcatgtgctaagaaagcctgcctacatggggcaccagcatgacacccccattctctgcacccagcggtgtgtcaggcattcagggaaagaggcctcgggagcccttccaggacagccaaatccagcagccagctcttctgcagggcacattcctcagagagggaaccgaggactcacctactctccaggccagggtcctcagtggtacccatttcaggttcttctagatccagggccctctggccatggacatgaaagtcaagctcaggaataggggccggggagcctgagtcagacagacctggctggatgctggcccagccacctgaatgctgcgtgacgtggcatgtctgctaacctctcagagcctctgggattcatctgtaaaatgggaaggcttatcatgcccacttctaagagtaccaaaagggagaatacaaggagaaggcctaacccaaaggcaggaacacaacacatagccaataaatggtggtctcagactcccatgcagatggtctgcctctggagctgtgagccaaatggtacccactggtcccaccggtcaccatcacaggaaattatgcccaaggccaagtcaccatccaggtcagggttcaaggcagccaggttaggcctcaatcatggtctgtagggcagggagcaggggctgcctccttgaccccaggataaatcctcacaaagccggagggcccaggccaagcacttttccttaaaattaaacaagagctctcagcagggcacacttggactaagcagtgaactaggaggttactgttaacatgaatctctccacaaagtctttctcacataaacaccttgagaatgtggccttgagttctctggctctgcctgcccaaggggtggggaggcgtcagggtgagccctcagggacaggagcctgcagctggcaggggaggcgccgcagtgaagagggaggcccctgccctccagaacagagtggacccatgaggtccagcagccacattacatctccacgtgtttgattaaaggccttcagtttctgtttgtgtcctccgcgcagttacgtaactccacttgcttgcctgccactgagctgtctacacacactcctgctctccagccactgtgttaccgggacacttcaatgtcacccatgggttcaacacagcaaaacaaaaccctcagagcccccttccgcaagagcaccctgaggcttttgtttcctcactgctggtcacaggagaatgaaaggacctccccagaatgactgcaccatggaattcaaatgcttcctgccccaaagtgcttaaaaagacaagacccctctgtctccacacctcaggccgtggccactttgtgaccacaaaggtggctgcctgccacggatgtggtgccacacgtgtccctaccttccatgtaggcctcaatcttccggatgagctcataggacttggagcggtcaagcagggttctgatggcagggagcgggtccaggacgatggtctcagggtgggcatcgatgtactcctgaaagggaagcatgctgctctggttagagcaggggtagggccaggtagcaactcacccctcgcgccctctgcacgtccatccgttcctgtcctatcctccagccctagctttggtggagggtggtgcattccagcactgggacatttcgagcagtcacctggagatctgagagagaggcttgactaggccaaactcagaaatagagcaccacacagaagacagagaggaaactgcaaccaggctcagggcaggccgcctgactccagataaaacctcacccggaagcagatccactccaggcactggctcctctgggagtggcggccccatgccccgcactgataaggactctgaggcaggggcgggagagtgggatgaggccaggagtcatcagagggtctgcgggaaggtgtggtggagagaaacacgccacagggtgggcaccagccacccaacactcctcaagtactccacttctgtacctactagctttggggtaggcacgaaggaaatgcaagagaaaccgtgacaaaaaccagtctctaaggaacttactatcttcttaggggaataaccctaacttacatggggggaagacactgctgtccagaacagaactcaataaaataatgggcagaaccccacgccacccaggtgggccagaccaacccgagctgacatagcgaaggagcccacccttgctcccaacctccatgattctaaggacaaaactggaatgctggtgtgatgtgggggtctcagggaaaaagctggcctgaagaaggcctcaaccagctgctgcgggttgaattgtgtcctctcaagtcttaacccttcagcatttgtgaacgtggccttatttataaggaaacagggtctttgtggatggaacagagttaggactccatatgggtggaccacaccatatgggtgggcctgaatcccctggctggatttcttaggagagaaatctgaacacagacgcagggaggaggccgtgtggagacagacaactgcagtgacacacctacaagccaaggagggtggaaggtgcccaccaccaccaccactgggagccgggagaggggcagggaagcttcgccctcagggcctccggagggagccactgctgacgccctgactggagctgttggccccctgggctgggagattcctgcagcgttaaaagcctccctgtttgtgatacttggttgtgagagccgggggcagcagacatgccagcgtgattcctccgcccagccagcccccctgccctctgctcacccactccacagcccgtcagtgaggcctgcacaggctggggaaacacaccccagtgctgccttcctagtgagccttatggacagagagaaagagccatttggaattatttttcttaagtgaacttattttggtcctagtgaccacttgttaagccaaaagccacttttaacacaaaaaccagagactcatattcccacttctgctctgaaatcagcctctccttggatttcgcggcagagtatctggccctgggctcctttctgtctgaatgtttaaagacttcctctggcctcagtggtggccggcgtaacctaggggaggcctcgcattccagtcctcacgcctgtgactctcctcaccccttagccatcctctccctgcacataagtgcgaggacctagatgcggggcagaaccctccagccgtcagcaagccatttggccaccaacccactgcctgtagacagtgaaccaggcactgatgcgggagagcccaagtctgccgcccacatggagcctggggactaaccgaggagtctccttaaggaaggttttatctagagctgccctggggccaagcagccacacccagtgcctctctcctgacagtctcagcctcacccaagcacctacacctgatccctcgtctcatttgggagctctccatgggcaactacccctcttggcaccattccgtcatcagagcttgttcttttaaatgcagtccatgcttccaagagagcaggtcatgcatgaggccctccccgccgagactcacacatatgtatgaaatcatattcacagcccaacattaatagctgggtgcagtggcacaagcccctagtcccagctccttgggaggctgaggtgggaggatcactcaggcccaggagattgaggctgcagcaatgcacaatggtgccactgcactccagccttggcaatagagtaagaccctgtctccaaaaaaaataaagaaaaataaatgtcaacattaaaaggtcatccactcagctagaaaccatcactctgagcaaactattgcgaggacagaaaaccaaacactgcatgttctcactcataggtgggaattgaacaatgagaacacttggacacagggtggggaatatcacacaccggggcctgtcgcggggtggggggagggggagggatagcactgggagatatacctaatgtaaatgacgagttaacggatgcagcacaccaacatggcacatgtatacataggtaacaaacctgcacgttgtgcacatgtaccctagaacttaaatttaaaaaaaaaaaaaggtcatccactcaagagacttcacatcactgacagtgctcagggcattatgtggggtgcagcagatactcagatgatcaaaagccttctccgcttcaccccgccagatctatagtcctggctagcaagttcatgtcctcggttatgagctaaaggcacttggctgtcctcactcccttcccctaaacacaccaggaagcagcctggtgtagtgggaaggctatgtgacctagagtcaagaaacccaggcgcccgatgtcgtcacctctcagagtcacctttgggcaagtcacttggcttctcagagtctcagtctcctcatctgtgacatgaagaatactccagatgcccttagggtctctgtaaagatggcctctggttccaagggtgtaaacagactgagaaaatggagagtgtatttgtaaaggtaaacttgaaggctgcacaggggagccattctagaacgggatggaccaccagctagaggcattccaggtaacgggagggccacccacgcattcgctgccttccttccaaaagggggccaacagccgagcacgtggatgggatgacccaattctccctcagcaaccgaggccacttagaacacagatgtgctccttcctcccctcgaagtcccaagaaaagtctccgctcagctctgaataaatgagggcgattctgattccatgtttatgcgttaggacagtgacctttaaagagagaactcagattcattaagacatgaagttaagccaaactcatgagggaaagcggctacatgaaaccaaaggggaaaacatctgacaagcaggcgtcaactagcttttgactggggatgaaagcatcagcattaacagaagaattcttcctaaacacgatctcttctgggatgggaacagagagggcaaagaatttttccagtcacctcactatccacaagcggactttgtgccaagctttccagcttacctattatactgagggcctcgtgtatttttcacaagtctcttagaattaccaatctgctgggtgggtgagcttccgtaccattttatcaccactcagaggaagaagggcagcgccgtctccatggcaaattgtaagcacatgttccctcgcagggcctgccagctaaaggacaccaagagtgggatcctggagctaacaagggcagcctggctctaggcagaaacattcagcccctgccaggatgagggctggaacacacctggggcagagcgtcacggtgcccacctacagcgcaagctctctcagggttttcagaggccccaagcccatggaatgatgccaacagagacaactggccctttgctaagctgccactgagaatctgagcagaatgagatgaacgtcagagatactctttcctcctcgatcctcacaggcaggaaatgagcagggagtgagacacagggatttgctccttctaatggaaaatgctgtcagagtcctgagtccagattctgcctctgacattgattctgtgtctggagttaaccctctgagactcatcctgggtaaggtccattctgaataaagcctaccggaggcagctgctgtgggcatcatggagatcatggatgcaaaaggagtttgtagacacaaaaatgaaaggattctcattaccctgcaacacctgggctcctagggctaaacctgacgcaaggtttctgggctcaccctgccttgccctgtgcagccgaccccagaggagccagctgtgcccatggaagggggctgtggttctggcccatgcccaccctcctgctgatgcctggggtgcaacacaacctcccaaccccaccggcagcccaggctccaggcagcgaccttccaagggattcgtttttcagagatgcaactcaaaaaggactcacagattaaataggaatctgggatgtgtttcaaaacaatccgggttgggggcagggacagaagtaggtgagggacggatgaaatgagagtggctgcagctgctgacgcatgaggctgggaggtggcacctgggagcacgttgcggcattctctcttctcaaatatttttaatttcccataacacaaagtttggggggaaatgggaggcaggtaatcagatcttccccttctaccctgcacccctaagtgtgccagaaatggattcaaacaccaatactatctttcaagaagaaataagagccagctacccagatgggaaagacaacgagagattaattatagtaaggataataataataaataaaaatgatcatcatcagtaatcatttaaaaataaaggcagtggccacttacctgggacttgctatatgcacactgcttctttcaatataaaaacgctattgggtaaaagcccaaactataaaacttttagaagaaaacacggtcataaatcttcgtgaccttggattaaacaacagtttcttaaatgtgaccccaaaagcacaagacagaaaaagaaacagataaagtggacatcatggaaactggaaacctctgtgagttccagcccccatctgccctaggcctgtgctctgaggagagcctgtgcgtgacccgcctggcagaggcccaggggcccggactgacccctaagccagcagggacggctgcgcacaaggcaagtcctggcaggtctcgcagcaccttcccgtatttgcgggtcccccacagcacagagagggtggcagggtttctccccatttttctcaggaccctgagactctgagaggttttggtcagagacaaagtcccgggctccggccctgcccgtcctaacagcttgctccttccttcactcaggacccaggggctgaaattctgcccactgggctgcatggcctgagcgccgagcgggtaccatggcagggctgggaaggtcctgctccacacgctgcttaggaaatctctcctccagtgggtggggaggctggaagggaggaaaagaccccacacagagcctggaaacccctcctccttgctgggcctcagctcccttctctgtagagtgagggctgatggcatgaagggactgcatgccagggagctggaggccgccaggcccagttaactgggccttcctcattgtaagcccgggcctcacctgtaaatggagattgtacttgttcctacctcataggatttttattaaaaacagcctgattgagatatcattcacatacgatgcaatttaccccaaagcaagggcttttggaatattaacagggttgtgcaacgatcagctcaattttagaacgttttcatcccatccgaaggaaatcccattccctttcactctcagccccaagtcccagcctctggcaaccacacatctactttctgtctgggtagatctgcctattctgggcatttccttcaagcgaagccatgtgatgtgtggtccttcatgacaggctccttttgctcacatcgtgttttaaaatgcatccatgttgcagcgtgcggcagtgctttgttcttctttaagatgaaatagtacttcacggcatggtgtagtgtattttgtttatccattcatcattggaaggaatttgggttgtttccactttttggctgttaggagcaatgccgctgtgaacatacgtgtataaatttttgtgtcaacatacgttttcacttctcttgggtgtataaattgaaatgaaaatacaaaagaccccaggatttggctcctcaggcatggatgttttaaatcatagtcataatgatccaccacagtatacaagtgtagcacttttctggttcaacaagggcagtgacacaaaatattgcatttgattctcagagcagccccatggtttacagagcaaaacgtctctgtttttattcccattttataaataaagaaaccaagtttctgagaggcaatgtgactggctcaaggtcaaacacaaccagctggggggctttgccaggattcaaaatcagccattccagtgtcaaacgccaggccactgcagtgcacctggtcacctacagaaacaggctctgtgactgaactgttgtgcatctccagaaaggctagggagcacctgaaagctaaacgttagtgaactcgacatatcactgtggctcgcggtggcttgcgcctgtaatcccagcactttgggaggctgaggcaggtggatcacctgaggtcaggagtttgaaaccagactggccaacatagcaaaaccccccgcaaaaatacaaaaattgccgtgcatggtggtgcacacctgtaatcccagctactcaggaggctgaggcaggagaatcacttgaacttgggaggcagaggttgcaatgagctgagattgcaccactccacttcactccagcctgagagataaagtgagactccaactaaaaaaaaaaaaaaaaaaaaaaaggctgggcacggtggctcacgcctgtaatcccaccactttgggaggctgacgcgggagtatcacaaggtcaggagttcaaaaccagccagttagagaccagcctggccaacatggtgaaaccccgtctctattaaaaacacaaaaattagccgggcatggtggtgggcgcctgtaatcccagctactcaggaggctgaggcaggagaatcgcttgtacctgggaggcagaggttgcatgagctgagattgtgccactgcactccagcctgggtgacagagcaagaatctgtctcaggaaaaacaaacaaacaaacaaacaaacaaaaaacggcaagcacaggcctgaaagtcagcgtgggcctgcctggagtttgcttctcgggactccagctttccacgtggaatagatcaagcatcagagggggcacaattccgtcacctcccccatggccacagcagcatcagctggggatgacaacagcctcctgtactgaacccaacaggattctagaatcctgatcaccacctggctccagaaggagataggtgtcagcaccaaggcgaacccagcgtgccacacccagaggaaacttcccagccgactctaggatccactgcatcagggcctgtgtgttcagttaacactcagctaccccactaacaccagtgattctacccttgacagaagaactgaaattacttccttatggctgttaaaagtactcacaggggctttcatgggaaaggaagcgaccctgggctcactcagcacaatttcactcccctggctcctcctgagagcacagccaggcccagctgagggccacaaggcctggcctttccaccagctcctccgtacccagcgccgggtgaaaccctggaagtctctggttcctgaagccttggcatcttgacgggggtcctgccaagattccagggtgagttataaacatgctcaccacgcacgggtcacagacctatacaccttgcaggaatggacatgtttccccctcaaaacaaccctatgtagatcccgttagcagcctcatttgacaatcaaagaaactaggcctggccaggtgtggtggctcacgtctgtaattccagcattctgtgaggccaaggcaagtggactgcttgagtctgagagttcaagaccagcctgggcaacatagcaagaccctgtctctacaaaaaattaaaaattagccaggcatggtggtgcgcacctactcaggaggctgaggtgggagaatcacttgagccaggaaggtcggggctccagtgagcagtaatcacgacattgcactcagccggggcattacagtgagaccctgtctcaaaataaaataagaagaaaaaagaaaacaaagtagggctcaaagcacctagtaggtggccagggctctccctgcgagcagtggccaagatggagtctgaacccagggcctctggctccagagccctccagtcaaagacccaaggcatggaaggcctggcgaaatgaaaagcatctcaactctaactagggccagggttgctctggggcatttcaggaaaaagggaagcctttctcatgttcactaccccaaggcgaggccaccagcctgacagtccagggaggccgggtgtgttccatttggggtctgcatgaggtagagcatccaagaaaaaaaatagtagatccagtttgcgatttcctttcccagagggaaaggcaaagatggtcagaactagcaaaacccagatggacccttcatccagcccccatctttttggaaaggggaaaggcagtggtagcgaggccaaggtcgcaagggagagtggcagagctgagactgcagctccctttccactgttcctcccaacccatggtcctcactggttgtttgttctctcaaagccacagctggaccagaggctctgcatctcttcccagccctggagcaagacagatgaaagcaaatgaagacacacaccccttaggacagtaaatacatgacataactgaaggccacagtccacagggcctctgtgaggagggtccgcgtggcgcagggggaagagcgtgtcagggccagcactgcacttatgcacaggagggctcccaaggcagctgctgaatggagtggcccctgcagggggaggactaacagacataacagtgtcaagagcagttgtactttcgaaggcagaaagtgtggttctgcagaaagcaaagcctctccctgggaggtcaggtcacatggggagggggtggggccaggccaagcaatgctttctgggaaggacaagtaatgaaccctcttggcagaccactgcaaccgtgaaaccaacccctgttgattaacttgtcatcaaccaaggccagccgaacatcccccagaagaagtcttcctggcacctcccagaacacctgcctgttgattacagcttacagaaaaccacatgccacagatagtcctgggaaatccacactaggcctaggtgcaacagaatgtgccaggtggccaggctggcatagggttggagttggagatgcatgcaggtaaaccttggaggtgggctctcaagagccaaaaggaggttgcagcagcatccactgtacgctgggacaggaccaccaagcctagctacccagggtgccattcacaaagcctaccactgggctgggcagcgtgcaacctatgtaacagtcctgacagtcagccaaggcttctgcctgcccatcactgtcagataatcttttgcagcccagctacacctggctaacttaacccgagcgcgtgggtcctggggcactgtgcaagttgaaacaaatgcagagtcaagaaacttgggttacaagtcctagaactgccattcactttatgtgtgtttctgaaagtcacttaagttatctgtatctcagtttcccatctgtaagatgtgtgggctagaataattcatttataacatcctttctgcctcttaagttctagattatttgattctgtgatgtgacgaacaaaccaaaaacagagctgttaggcccctgaacggagccagatgcctcccaggcccagagacattcaaacgcaggagccagggcctgctgtcctcagagcacacccacggcatggtcactgcacgcatcccagtcgcctgcaagccagcgagatccatgcccaccacaggtgagggagggaggccagcaggaggcacaccctggtgggcagtggacagctgtgcattggcgacaggcaccgaccaccagcccaagcaaagctgtcctctgaggctgcggttccctgcggtctctgttttgcctggattcagtcctagtgtgttgaggccatttcctcactccttctttcctaacttttctaaaacggctccttgggagagttgagctcccccatcagcagacacttgggtcttaagcaaccctcatttgtattccagagaaatctcccacgtctgagcactcagcctgaggcctcccagacagtacgagagcagaaagagtgacagcctctgagaagcacgtgtatgtgggagcttgtgagtgagtgcgtgtgtgtgtatgagtgtgagagcatatgtgtgtgtgtgtgagaatgagtgtgagagcatatgagtgtgtgtgtgtgcgtgcgtgtgtggtgatggatgtcacctattcagctatagagcagccacattctccccaccctcccagaggctcctaagtggcggccatgtggctgagcaaaggagaggcgtggggctgaccagcaataaaggagcagaggagtgtgggtgcggggggcacagggttgggggctggggaggagcctgctgaggttggtgatgtcaaccacaaagggccacaggcatgggccaggggagaaagggtactccaagcagaggggacagcaaaagcagaggtctggggtgagggagtccagcacattcacgggcctgctgggggcctggcagggctggggcggacggcagtctcaacatgaaaagtgaggacaaggtagagagcaggagacggaccagctgaggagtttggacttgaccctaaagcaacagggtcctgagctgggaagtgacaaggacagctatgggttatggagtgaccagtccagcagcctgcaaggccacaggatggagctggggatggatgcggtcttggtggtgtgtcagatgtggtgctggccttaggggtatgtgtgctggacctcactgttcaggaagaactgatgggctgccttcatcttttatacagtgatctctgtgatttggtagagctggcaaaaagaaaactctgatgcaatctgcctctaggtctatcagctcctgtgagccaatatttaaacccatgagctcaggctggggtggtcagacatggagtgcggaagagaaaagtgaagtttgagaacacagcaccagacaggggcaagatggcccagattcagggtccgggcaagccaagtgaggcagcatgacaccacccttcccagggcctggagctcccagcagcaaaaccaacaggcaagaggaggagactgccaggatcctggcaccctccaacactctgtgactccatgccaaggtaaactgattagagacgcttcctaaggtggtggaaagggaccagtccttggttggtggcagtgtaactggtactgcttctgcagagagaaaccggacaacagccaaaatgcagaatgcgcaaactcagcatcccgattcctaggtgtttatcctacagaattcctcacctgtgcacccaaaaatacatgtactaggctattcactacagcatgtttctaaaacatgatcagaaatgccctaggtatacaccagtagagagctggcttggtaaaaaggacagggaggccgtttaacatgcagcagttagaatgaggctgcctgcaaaagactaagatgagatcacttccagggcataccgtacagccccattgtacaggggctgtgcagcgaggaagactgtctctgttcagtcccacagaaccccctggaaaggctccaggccactggaactgatggctgccccccaagatgggaagcggctggctgagcagcagagggactctgttcacaaacttgttccaaatgcatgtgccagctcgttcaggactgctgagagccgagcagtggtgcgcagggcaagccacacttaggatccatcagactcacagtccatgtgcaagctggtcaaactcggtgtcccaggcccaacaaggggtaggggaaacgctggagccctgggaagggctggggaagcttccctggagcagacgccaacaacaacccatcccctccctggtgaacagaatgaatatagaataagggattcaaagcaaccaggctccagcctccagggtgaatgaactgtacatgattctccatttcagattgggggaaggcattaaaaggggctgtgtggggcggagcagggcaggggcccgagcacgcaaatggggcaccctgaatgtgattctgcatgcagaccccactgtgtctcctgtggcctgcaggtcacaggcacacccatcctgaaggtgggtgctacccacaatggtcacttcgggtcatcctcccatgggggctactgaggcattacagtgtcatgctcctcacttagccgcctggcatgtggtgtgagccacggctgggagaaaccacaggctctctgggggggaaactgttgttcaagagccagcaggaagacccatgcaaaacaatggtgttcaggccaaaaaataaccctgactgctacagaggagagggctggaaggaaagagaacactattatttggagacagcaaactccccctttttccaggcctgccactgaaaacaatacctcccctctgtccccagatttcacaccaaacttttatgagctttctccaccttctgtcagcgggaggcaggcaaggtgcccagccagagctattcccctgacaaatgccacatgctgtgtcacagcaccatcacactagtcaggtcctctaggcgaccagggaaggatcccgcaggatgaagggacagctgggatttccacgcagatggagctggaaggggtcggtcatctggcccactgtcacagctaccagctgaacaacaggagggcaagaaaggggctgcctgcccaaggtcacacggagctgggttccacccacctcagcagcagccccacgccccctaagcacctgtctgaacccctacatgcattcccacgcacctgctcaggtgggcctatgcagctgcccctcccctgtatacaataatacacagaagagcagcttccctacatcaaggccaaaggtgacatgcctgctggagccccacccaccccaccctggcccacagtcgcccggccgagtctgactttcagttcccagaataagccaatgcctcctggcagcccatgggctcccctgccttgtccgtgtgatgcattgctgggtttgcaaatgtgactcacagccagcagggcttacaaactagtgtctgcagggagagaacagtcatccagaatcagggcacagtttgcggtggtgctgctgacctaggccaactgggtcactgaggccagaggacccctgggctcctcacctctgcatccagccacccgagtcttctagtttctggtacaggctctaggtgcacaataagagagacagatcctgctgccaggggtgacctggctacgacatctaccccgtggatgacactggcctctgttccacatgtcagccatcctcttcagtggctgcgggcatgctcagaagtgggagtcgtcctgccgccccaggagctcctccctgacctctgactgctgcaatgggcagggccccttcctcctcagagagcttggggactagaaaatggcacgttgtctgtggctcaacttggggccatcaaagaggggagctggcacgatattttgtgtcctcaaagagctacccagcgctcccaggaggccaccaggcccaggctcagcctggctcctgccagcccactgcagacagccctatccaccgtgctccagctgcacccagctactgcgggtccttatgcctccatcctgtttcactgaagggcctggtcaggtgctgctcccttgcctgctcccctcctgagtgtcctgccctttaggcctcaactcaatgtcagctcttcagaggatcagtaacaaggacctccctgttctcccaggcctcggtgtgtttcttcctagtactcgccatcactggggctgtgttaccttgtcctctatttacctatgttttgttcccatcatccgatgcactcacactcagatacagctccagcagggcaggggctgcgtccaccaggtcttattcattgttgcatctgtaatgtcttttaggagaactctggcagacagtaagttctcactaagacttgctgaatgaacataatagttactgatgaatgatctcacagatcagtggagagacaaacgggtaggggccagggccagatccagggctggctgccaggaggcgtgggaggcctggggcagggacctatagggaggggctcagaggatatcctcatgcctcactctgtccatcccagagggccgaggtcagcagaggcccagcgcgtggtttacccggccggctgtgctcttggctggtgaggtggcaatgggatttattacatgaagacaaaggcagacacagtgggctttatcacgggcacacagcctgcacaggcagcacagaaacacgttgggaagtcatgccactcacacaaaccaggaggaaacagaaaacagggtgtcctttctgccgcaggtactaatattactgaagaaaagaagtgacaagatgttagtcctcttggtgtgtgattccaaacactaaaacccagaaactgcacccagtggggcctcagtgtccacacaaaaatcagaaacaacttgactggcccacctgagctctcagagctgctggacccatctcttacaaaatgcagtgacgctcgaccaggggtggcatgggctccctccaccagggaacatctggagacatttttggttgtcatgaggggcagggtggggagtgctgttggcatctggtaatgagcagccgggaaggcaactaagcaccctgtattgcctgggatagcccctagcagtgcagaattatccagcccaagatgtcaatcatgttgaggttaagaaacccagaaataatgtgcataaaagttatttctaaaactttggggaaaatgtattattgataaacattgatatttctaaaactcaacatgcccccagaccttgagctgaaaaaccctgaccgtccacacacaagcagaggggctgcagcccacatgctggctcagagcgcaggctttggggtgccctctcctgcccctgtcccaactgggctgcacaaagtctagctctgttcctggttggtaagagggccacatgtcttcctggggaccaggcttgctttccacaaggggaagcaactgcaacgggctaacggcacagaatggtcccaccctccccgaagcagaaagggcgattcctggcctggcattggtgcacaatggacagattgtgtggctgtctccaccacaggaggagtcgcctatgacccagggcagcagtcatcgagaggctgacctcacagcaaccccagaacaggacatgatctgtttctctgggaccagggctgccagatgcgtccaactctgcctcccgtagcatctgctggccagcagtctcatcgtcacacggcaccagctgtgtcagaggcaatcccagacgatgacctcctgccaaggtggccctgaaatcaccaaccctcacaccacccacagtgccatcagctgtcaccaaagcccctccgagctatgatcctgaccttgccactttctacctgaccctgggcaagtgacttaacttccccgggccgcagttgtctcctcctgaaaaatggggaaataattccattatctcagggactgagatggggaccaaagacataagagatgagaacgcccgtggcagaatgggtcacgtggtacattcttagaaaatagggagccctcccatggctccctggtgacaacacaaaccccttcccggggcccatggttcttactctgaccccactggtcagcaggcacaaaggcaaagccgacacaagcccacttagattctacggtgttatttatcctctgataggtttagatgttatcttccaagtcggactcgaacacctagaacaacaaaaacctttgtttcttctacttcctctccatccctgtgctggcgactgctcaataaacatcaggggccaacagggtttgattcaatgcagctgtgaaatcacatttgtggcaaacgtgaaccgcggccttgggtagtcctttggaggcagacgcaacagctctgaaggtgttctgtgccatcctgcaccttccctatgcggtaggcaaggggaccgaggcccaggtgggccagcaggtgaagggtggggctaggaacagcacttgagtccctctgacccccacctggccctgccttttaggcatttccactgccctagcacagaatgcatctcccgtttggggacactttcataatcactgcctcactgactccaattaggactgagagctctcaagtcagctggggccacagataaggctgacagagtagtcctactgtcactgtaataataatattgacataagccacggtgactgatggttcactaggcgccgggcctgtactgagtggctcgtacgcatcatcacaccccaggcactcacagtaagcgtggctgactgacccttacacacacgtgcaccactcacaccatgccaggcattcacagtaagcgtggctgactgacccttacacacacgtgcaccactcacaccatgccaggcattcacagtaagcgtggctgactgacccttacacacacgtgcaccattcacaccatgccaggcactaggggaatcgcaaattttaattagtttaatgctaacaataaccctacaaggtattttaattgtttttaagaagaaaaaggaactatgcagtattgggttcccttgcctgtagggaggtccagtgagatggatgagtccgtgtcaccacagggcagacactgagagccagcataagcctcactgccttctcatccctctgccatgacggctgtcatttcaggctgcaaagctgtagttaaccctccgtgaccacgtggtgcaagcccagctaagcctgtgctgggtgaggggagctgtctatccctgtggcgaagcctggcctcgcttggcggactagcagggagggccccaaacatcaccccctcccaccagctcccagccctactcacttcctgtcccctcaggaggatggtggggtcggggaggcactactgaaggctacacatggtttccttccagggacaacatgagaagaaccagtgtggccaagtgtgcattctcttccggcatccttcggggcaggagcttccttcccagatccactttagatgattacacactgagaggagccaggaggtgagtgcaactttgtcctgtgtaggctgggcaaggctcaagctgctcagaggccagccttcatggcagcggagggaggggatgctcaggaccacatgcaggggcacctggggctgaggatgggcacaacactgagcctggggccatgagctccttcttcaacttggacgcacctgggctccaaagagtaaacagtgtcctcagctgctcagagttcatcttgcactggcaatctccccttccaagcagggcctctctcttgccaattatatctgatcatatcaccgccatccccgccccaccctccctgcaggatagagtccaagctgcacagcctggcatgaaaaagccctcaagctccggccttgctgctccctctccaacctcgctgacacctggagacatcgccgcacatgcccatcaggcagcgccatctgcctcattaacgctcctggcctcctccctccccgctccaagcagcccagcagagccacgtcctccctccgcaaggccatcagggcaccccatgaaaggccgccccagcgcatgaccagcactgggcatgcgccgccacccaaacacttaggcactgcaggcggcaatgggaacaccagctgctgggagcagacacaatccctgccgcagtgaagggacagacaatagccactgataaagaattacgaacttccgaagggcatgaaggaaaagtgcaaagttggcagggcctgggacgagagatgtgtcattaatcagctcacgagggaggacatttcttgggaaggggcactgagctgacggaacagcttgtgcaaaggcgctgaggtggacacacatcagagcctgggcagctgctgagggggccagggaaggagcgggtggggcagatcaccgaggccccatgggtcaagctggcaatcatggccttcagtgtcacagcaataagaaagcatgggatgttttaagccaagctgtgctgtgatcagacctgtgtttttcctaactcatcactttaggggccgtgaggtcagttctgggtctgcctgctggcctctcctcctggccaggagctcgcgggcagggcacccagcagtgctgccgcagaggacactctcctagcagtctgtgtgcagaccgggaattcaggggacatctgagggacaattaccgtccttccagctgataaagacagggcaaaggcagcagttgagactgaaacttccttcttagtcctaagcttattcagggagaaccccaggaaggtcccccgaggcagccccacatggcccatggatcacaatcacagcaccccttcaggggcaattccagggctagaaggggcagcagaagaggacggtgggcccctcccttcccaccctgcacccacacctgtcaggtggctctgggcgccacagcgaggagaaggctcgtgttgcccccctgggaaagccactcaccaggccaggaggcccctagtgtccccgagcctgaggcagggaccctctcggcatgccggccccacttgcccacgtgggcaggccctgggggcccctgcctggttctgcacactgagaaccaaacctcaggcagagcctcaggggcaacaggctgctggctccacatgaaccttggagcagaaaaacaactgaatcatcccaattgagtctccaagccaagccatttagaagccaatcaaaaacacacaaaaaacaaacaaacaaaaacaaaaaaaatccaaaactctggggcagtgatgaaggttctgtgacaagcagctttaatgttctgcagtaagcctctggcccacagcctccacctgcccaccagggcagccagaagcaggcacggcctcctggctctgggaatttcttccctccctggggaccggaactttcacagaggcagcccagtgcagtgctctggggccctgaggaacatctcagaaattcatttttctccacccacacagccccaaaccacttcctcctccctcccaggacctgagtatggactgtggagaaggcccttcaagctgagtccctgctggggcaaagcatcttgcctcggtttccctgctcacaacaaaatgggaggaccccagctctgggtgctgcttcccctgcctctgcctatagcatccctatccctcccagtcctcaaaccacactcatgcctccttgttaatgtctagagaataaaatttaaaacaaaaatctgaaaacaaagggcacgactgaggtcaagtgtccgcctccctgggtctatgtggtctggctctgaacttgcatcttatggcagagggaaggggacgatcaatgctgacagcccagtgaccggtggtagaaggaagcctcttccccagcccccatcccagtgcctctcagtcattctctgtgccaaccctgcctgcctcctctctcctggggcctctggaaagtgcagccccgcacccttttctccaaaggattgttctcctcacaaaggaggaaacttcccaccttatcagatatccggcctcttactgaagcacagacggtgatgaaaatttatcccagaaatatcagtgctgggaggttatggtgaggtcacggcaaccatcccccaagacccagacaagacactgcctgagaaatgcacctgtggctgcctgacagccttaagccacaaggccccatgctgccctccacacacgctccctgttaatattgttttctgcccagaaaaggaacacagcgggcactctcattcactgtttggacatcacttgcctgggctgtgggctgtgtgtgtgtctgggaagtgggcaagagggataagagcttgggagcagatgttccagaactccgggcccaggctagctgggagatgtggtctctaggaagagcaaccgtgtgggtgtgatgaagtggcactcagctacaatgggcactttacacccacaggcatttactcctcccagcaacctgcccacccaaggaggaaggaactgaggctgtggggaggcacgcggttcctaagttttggaacaaggatctgccttgaagacagtttgactcccaagtcctccgcctcatccatctctggagaggccacacgacaggtgaggagagcaagctagcgcaggctcaaatcccacctggaccactttctagttgtcctgcagctgcttcttcctccacaggacgggaatcattgaaccttacagctcatgggagcaagtgggtcaaccgccatgaagcgctttcgagcagggcttggtaagcggtaactgctctgcagtgctttctgaggtaacggtaatcaggcatctggaaggccatcgtcccccagatggactcagcaagagatgcaccatccctgccccaaaggtctgcgtggcagcccaggcatggctgtgctcctccagagaataagccccaagggcaccacaggcacatgaactgggcactcaggggccttccgaaggagacgggggtgaggcaggagcaaatggctcaggggagaggaaagtcgctgtatgacttgggatcagctgggaccacaccccaggacagttgtgtaggttggaggcagagaggaacagaagagcaagccctcaggatgagcagcggctcacctgagaaagtcaagactgacccccggctctgctgggtccctgtggacaagctgcacatgcttccacgcctccacttcctgcttatcaacaaggctggtgagtctgcactgagggctgtggggatcaaatgtagcacatgggtgagtgctgatcagcccagccctggcacagggcagggactcaggaagcagcacatcaccagggcacacatctcctctgtcttgttcccctcgaaccccagcacactcctcccaacatggtctgagcttttcttattcctagcacccattttacaaataaggaaactgaggctccacgaggtcacagaggagcccgaccatgtttttcccacagtctccagtccgatcaaggagacagtgttcagcaagtggaatggacttggggccactggcagggcagacgccctggagggcacaacgtgggacatgccctgcccccaagcaggggatgccaggagcaggctgcctctgtgtccggggccacttcctggtgggaagcaggaatgtgcagcagggagttggccaaggaacggggtgagagccccaaggaagcaaggggggccaaggcggctgaccccgaacacacggggagagaacagtgtcggcaggacggcagcaccgggtgactaggaggcgggtaagattccctttgtcctggtgaagaaaagcagggcaccaaatctgcgcctgtcacacgctagaaaccccatctcaggcatccccatcccactaggcacacctgaaaacagctaccatcttgactgcactttcactgacaatacaactttgtttttcatgacctctgagccgctttctagaggacagaatcacgttcttgtccacaacagagagaacacaggacaagtcagtagccagcatgagaaccccagggcagtgggcaggtcactgtgcgatcaggacctgggaggccgctggggaagtggtgtggggagagggaagcagccaagggactcagcaagatacctcaggccatgctcaaaggtgagtacccaggtcaaagtaatgggcagaggcagggttctccaccaaggcaggactcagttcaaaggccctcgggggtcccctttaccaagtgcagcagaagggttccatcccttgtgcctacctgagccaggggaaagggttgcacatgcctgtgctgaggacgtggaggccacactggaactcagcgatgcctcatcagtaaaccgtgtctacacagccagggggtggagacggcccaaccatgccctggttcagtccccacgctacacccgaggacactgacgccgcacagaagtacctgcccacgagcccatgtcttgccagtggcagagccatttctccagactatacctccagagagctgctaccgccctaaatacacacacggccattccagggcctcccctcctcctcctgaaaatgccacagccaagggctgcatggtcctcactcacctggaacctgtgcaccagctccagggactggctatcattctggtcggcttcaaggatgacgtcagtcagcttgtggatgatgacgtccagggggccctgctcctcgatcggccggctaaggttcagctgtgaggcagggaacacagacaaaagcaacaacttcagcacctgagtccactgcccccatcctcttgtccaccctggggcatatcaccagaggaccctcgagcctccctgtagcactctggagatggggcaggaggagggctgacatggaaaatacagacaggacaagcaggacaaaccctccaagaccccacaactcttctctcctgctaactcctcaagggcacaccccacgtttgtaacttctgttccccaagccccatgctacccaggatgcagaagacacataagaggaatcagggcaatagtgtcaacaggccaggcaagtgatgctgagaaatggctttacagagaaaggcttttctcaacacaccccatctgccctaggaaaactagggttccaaggggttatgtaaatgactaacatcgcacagccagatcagaacttagatctaagtggatactgcttctgctaatctataaaaagccttagcaaagctgtggtcctcaggaatctagaaattgccgctttgagcgaccagccacttgcacttcacactgaaatctgggctcatcgggagaagcgaaggcgcgtagggctgcctgcaatctgttccatactgctctcctgctatgccagggaaggtgtttatttttgcaagtgcctgaggttgggaagatcaggccccaagagagccagagcctctggccaacagtcagcgtcacctgaccccaagacaggagcacctgccaaaagccagggcagcctgacccccgcttcctgacccgccacatgtctccctcccggcacgcggccaccaccacctgcaaggccagtgcctcggaggcagcggcgccagcccggcacctggctgacccccaatctggccttagcagaggccagagaaggccacaagccccacccctgctctcatccccacccccaagtgggtttccctccaggattcaaggctgactgttttaaaaatgttacgaaagacatcataatgacaactacaaatggtcactggcagtgggcaccacgctcaaagcttgcgtgcatttctttcattgtatttaacaaccactatgagaagtgattttacgaatgagaaaagtggaggacggagacttttaaaacctgcctagggtctcacagcaggaaggcggtgaagtggggacacaaactcagatctaaggctgcgcttctcactccattccccgctgcctgcccctgcaaccccgctccccacgcctgctctgtgccctaggcagctgtcctctcaggccacaatcacctggctgccttgtcctctggccaagtcgggccaactggaggcacagcagaagatgggcaagaaggagagagggagggaatgtatttgcagcatcctcacgcccccaccccctgccatatttctggcagcagtcacagcccccatggagcagggcagcccctctctcaacactaccgcctcccctatggctccaggtacatttttggtcccctagtcccctcaggcctaggggtggtgacagctctcagggcttgttagcaccggggaactttgtcctgtgctggctctcgggcctgcccacaccctgtgatggtcccttactaaactcctctccgttgcacccccggaacgcagcagctcttgtctgctggtgtctttaactcctctttcttactgtttgccaggaaagatgttaagggatttcccctatatagaaaaaaaaaatatcctttagacctcacaataagaaactactaaggaatgctgttccctccccatggtgacaggcctgtgtacaaaacaacataaaataaaaccaaaaccaggctagctgagaagctgcccatctctggggctcttgggtgaggaaggggaagggaaagacacttcccaatatctcctgagacttggcgccggctcatcctcacggcaagcccaggggccggggaagacgctccctgctgcaaagaccaggacaccaacggcccaggaaggaaaatgaccaagcaaggccatgcaggtgaagcggccaggatggaggctgtgcagcaatgcccatgtgtcagtctccatgagcagcccgctgacctgggctcaccatcccctggggcctcagtttcccctttgatagaaacaagaaactgcaagagctttgatggctctcttcacagattccaaattacactccacccaatacctcttcccagaaaaagcagactctgaaggaaggtagagaggccatgggcagagaacactgggctctcagacagagccaaacaccaacccatttccactacagcctgtggcttcggtgggtcaggcaccacaaacgagaggccaagacagctacgagcgcagggggagccgggccacaggagcgacgcatccgggcccacagaacccccatgcccaccagcacccacatctccagacagccctccaggtttccctgcctgggagaaactgtggggttcccttggcgctggggaaggaggtgagcagaggggacgcccttggtgtcctcccctggcatcagcctgaggcccgtagacctgacaaccgcagctgtttggaaaataagctctccgcatccccggcgctccactgaaggtaaacagctgagctctggaaacgggccaccctcctttgtgtattttccaagcattttcatgccagtaaaacccttctgtgagaacagcagcttgggacacacatcaggcctgggctgctctcgggtgcggccgcctctcgctgtggcgtctgtgctgggtaccagcagggctgctggcagctctagtggctcttcctcaggtgcctgacatgccacaactgccctgaaggggtctgtcccctgaacacactgcaaacaggctgcggtctccctccactagctagaaaagagatgggcccttgggtgcggcccccacaggagaaagggcccagctcctgagactggggaggccacggagaaaaggacactgtgcagggggatgcccggggggaaggacaccacagaggcaggtctcccagatgcgatggggacaggaactcatttcaaggttgtcattctgcttttctgaccacactctgcccccagaaaaaagaacattcccagggacttcttgttctcctcagaggacggggtctggtttgtccctcccagcaggagcaagggtgtctcaatgaaaggctgcccgccggggcctgaggtctgtgggcactccgtttccaagtcatgccatctcgcagggcccatgctggatcctgctctgtgtggcgcttggagttcagaactcagagaaaacaaggggccactgtttccctcagggacgaaggcagagacttactagaggtgggggcagggctgggagacggcacaaaggcctgcaaaccccagtggccccagagtcctctttgacttccaaaatgattaacccaatcgtacccagcctggtaaccaagctgagctaggccctgacactatccctgtctctcccaggatctggaactggggaggggtgggccaggcagacaggcctagaaacccatctccaatccactgcttctgaacaagagcaggtcactgagctgtgtggtacctcagtttccccagtcataaaatgaggatgctactcacccttccctgcacctcacaggattgttatgagtcccagagcaaaagttcaatcctctttcacatttctcaactcacctcagcccaaacaggaagaattagtggctcccttgtgttgcccacagccccagaaccctttgcacgtcgctccaggattgcaccgtaaccccagttatgatgctgattctttaatccactgtctcctgctcctgcgctgggggctgctcttcccccacggtatcatataatctttctgacccaattcctcaatttctcagtaactggtttccaattactcagataatggggagggctgtgtggccaccgccctctaggaacctcagtttccttgtctttaaagcaagaagcctcgcgatcccagcactagcacccagctcttgcacacttgctcggtgccaggctctactctaagcacttcacatgcactgagttgctcaattctcacaatagtctgagacggggactcatgagaggcacagggtggttaaataacatgtcacagtctcacaacttcacactcactcttagcagtacctagccagtgacactcaataaatgtcagctattgtatttccctatacttactattcttattattactgaccagtggaaacttccgaaaagttttgtcccaaccaagcttgagacaaaatggccccaataaagggtgagagggctgaagtctgacttattcctctgccctctccatggatctgagaatctgggacagaactgccattgccaaagttcaaaggccttgccaagcagaagcaggtctctccagaagggaaagtcagatctgggaacctcatggacagacttccagaaggatgttggggccggacatagtggcttgtgcctgtaatcccagcactttgggaggccaggtgggccgatcacttgaggtcaggagtttaagaccagcctggccaacatggtgaaaccctgtctctaccaaacaatacaaaaattagccaggtgtggtggtgtgcacctgtagtcccagctacttgggaggctgaggtgggagaattgcttgaacccgggaggcggaggttgcagtgagccgagatgatgccactgcactccagcttgggcgacagaatgagaccctgtctcaaaaaaaaaaagaaaagaaaaagaaaaagaaacgagcttggcctcagaggactccatgccagtggtgtgttttcagtgggtttgattccaaaggaagactggagaagaggagatggagtcttttccctggcaagaacaactctcattctcaaaggtgctccagagaggtcaagagctaaaggtcatttggggctgccaccaagaccagcaggctgggacaaggatggtactggtcaccctagcagcctctgccccaggctggggagggaagctgttgaaaatgctctctgacccaattccctgatttctgagtaactggtttccaattactcggataatgggaagaaacggcaaactcgtgaaggcataagagtgggtaacttttctccctagaagataaagggtcaagacaactaaatggcctgaggatggtgctaccttgcagagccaaagttctgggaatttacgagctgacattagacccagaaaagctacacccattcagcaagcacagctccttaagaataggactgaccctgagttctcaggatgggccagtcctgttctgcgttcccaacactgggtgctggaaggccaggtccaagagcaggcaaaggataagcacacccactcccaggatgctggcctaaggaaatgatcaacaagtgaaggccacttctggcctagggagagtcactgacaacatattgacaagagaaaagacacagagagcatgtgtgaaaacggggtgctggctaatgctgggcatgccaccacaaagggctagtcaagagccactgagatggtgtggctgggcacagtggggcacacttgtaatcccagctactcatggggctgaggtgggaggatcatttgagcccaggagtttgaatccaccctggccaacatggcaagaccacatctttttttttttttttttgagacagtctcggtctaccgtcgaggctggagtacagtggcatgatctccactcagtgcaacctctgcctcccgggtccaagtgattctcctgcctagcttcccaagtagctgggattacaagcgtgcaccaccacacccagctaatttttgtatttttagtagagatgggtttcactactcatctctaccagatgttgggcaggctggtcttgaactcctaaactcaagtgattcacctgcctcagcctcccaaagtgctgggattacaggcgtgagccactgtgcctggccatatctcttaaaaaacaacaaaaacaaaaaaacaaaaacaaagaaaaaaacagtaactgagatgacaatgaagaggtcttgatagagataagagtaggtgcttgaattacaaccacatgaaccaacatttactgtggaaaaggctgataagaaaacccagaatatgaaaataaaaggactgtgggtatagcagccccttttctgtttttgcttgtttgtttgtttgttttgtagagatgtgctgggtttcaccatgtttggccaggctggtcttgaactcctgatctcatgtgatctgcccgccttggcctcccaaaatgctgggattacaggtgtgagccaccgcacacggcctatcagccccttttctggacacaaggcaggactgcacttcctgattccctggtaaatgggtgatcatgtgactcgttctggccaatgagctgtgagtgaaaacagaacatgccgtttcctgggcagagcatgtaactgcaggagtaaggtctccagagccctctctcccctctggtgcaggaccagcaaccttccagatggggctgctcagttttagatctctgagtgaataagatggacagagcccccagctggccctgtggacatgtggcatgagtgcggaataacccacggttttcagctaagattctgaggctgttggttaatacagcacaaccaaatctgtcctcataaaatagctggtccccctaccccaagcttttctttttcatttgttgaaacaaaggaaggatggaagggaagggaaagggaaggggagaaaagcagattaaggcaaacaggccccgacaggtaactgcaaggttgagaacaggatttagctatgatttttttcacattgtagtttattagtatttggatgagagaggaatggggatttatcctgtaaggggaagataacttgtcagagcccttaggagcaaaaggcaggagccttgatagagccacatcacgacgtggctattccccagcatcctaggaaagctcacccctagcagtcccctcaacctgccagatgagtccctcgatcccgtgcatcttggccaaggggctgcttcatctgtgttattgttcacagtggcacctgagaggccagagtcagagctgataggagctaacccctcccctctgttgccaggcaccaatctagtcctgtcctggggggaaagtacgaatcacaggctagcagaaaaagaaaaaaagggagcataaaagggctggcaggtctggatccacaaggtggggagtcagaagccacgtaacaaagcctgaccgccctgtgtgtgttgcggggagagcggagaggatcccacacatgaacctcctgttgccaggcctggaggaaggaactcgcggaatcctcttgcccacagcactcctccatggctggccagtgctcttcttcccaagccacctcaagcacagaggtgctccctccccaggcagaaggatgcccaggggttagagggcaggggctgagcctccagctgtgcagcctggggaagggcacatccctcccctccccaagcctgcttcctcgcctgtggagtgagggtaaagaaatatccttcctatagtcgcgatgagcacacagccagggccagccatcgattacctccctctgtgactagagctgaccatgctgtacaggtgtcagcaaataggactttcttcctcacatgaggctggatgttctctggcctcagcggaggcctttctggccttctttggctttccaccagcatgattctgataatcacctccaccagaactaccgggacccttatattccaggtgctgcagtgagcaaatgacagacctaatctccttagcacataatctccatgtccttaggaggcagaggccactgtcaccattttacacatgaagcaaggaagtcaagaggcaaaacaaccgaactgaggctgtataaccagcaaatctcccccaacacccccaggtccctgtggctccgggacacaggctcctgagccttctgccttcatcaggaaggggagtgggccgacaacacagctggctagacgtcctttcctgatgtgcagggattgaggctggggggagctatcatgtggtccgagatacaatctgagggggccagaggcagggaagcacccacaagcacagcgtcaacaacccagacttgccccagttccaggagaacaggacaattctgaaatcctagctggcaggcctcaagttttcaaccacaacgccatctcctgagagccacctgggtcaggaagcgagaacctgtccagggctggaatcagggtctttccatcctgccggccaccgacacagcacaccactgtcagctttgcagagttctccaagatgaagggcctggcactggcaccccaacccggaaatcaagagcaggaatggaggctgtgggggcaagcagacagtggtaaggcctgcctagcgccgcccacgttgctgtctttctactttagttgtggtggttttgccaggcagaaaatcttgacttttctgtaattcaaatgtataaatattttcatcttttgatctttgctccctagactgttttttaaatcagcccacggttttctcaactatttttacattttaagtttttatcattaaatcttaaatccaccgggagttgtttcagtgaaagactgaggtgtgcatctgtgtatgttttcctccggatgagcactccagtgtctcaacaacatttacttacccatcttttacccactgtttgcaaatgccaatattttcataattctcacattttttggactcttcattaacttgtctttcaccaatatcacaatgatttcgtttggttttctttttcccacattgttttaattacaattgcttcatgataagcttaataccaataagatctaggtcctccctttttcacaattttcctgaccagtcatgctcatttatttttcctacacatccttaagaacaggacttggagctgggtgtggtggctcatgcctgtaatcccagcatgggattgttggaaggttgaggcaggtggatcgcctgagtccaggagtttgagaccaggctggatgacagagtgagaccccatctctaaaaatataaaaaattagccgggctggtggtgcacaccacgcccacgcctgtcatcccagctactcaggaggttgaggcaggagggtggcttaagcacggattgcgccactgcactccagcctgggtgacagagtgaggccctgtctaaaaaaaaagaaaaaaagaataggacttggatggagaattacttatatttatgtatcaatttaaggaaaacccatggtttgatcatgaatcctcttagccaggaacaccacgtattatatttgcagcttatatcacaaatgactaatctctctcaaatatattaagatcctacaaactgatttttttaaaaagaaaacctaacacaacagaaaacatgaacaaaagatatgtttgaatgttaagtacagaaaattaactacaaaaggcttccaacatataaaaattagaaaatactcaacctcattcatacaacaaatgcaaattacaactacattatgataaccatgttttatgtaccagattggtgaaagtcagagagacggataacagactgtatcggccagggctggggggatgcagattcaaccgtctcgacggcagcaagttggtaatatccatcacaatataaatgcataacctttctcgtccaggagtctcacttccaggagctgatctcacagggtgaactcacccacatatgcactcacacacattgctgcactgtttgtaatcgccaaaaattagtaactaaataaaagtccaacaagaagggactgaatcacttatgaagatccatatggtggaagaccatgctgccacagaagagaacggggagtgctttctgtggtgacgtggaaagatctccaagaaggggccgatcactgagtataccatgctagaatatgtatggggaggggaaaaaagggttacacaaaatcaacatgtgcttgtacagtaagtcttcactgaacattggggataggttcttggaaagtgcagtatcaactgaattgtacagcaggtccttaaataacatcaattccttcaacgtcacttttttataacagtgagaaaaaaattggtttcattatatatttcatttaaaggcacagtcctcaagaacctatcgaagacgttaagtgagatcttactggatatgcacagagtatcttgggatgtgcactagaaactggtcagagtggcagccaccacaggggagaggaccagggggcttgtgggatcagggtgaaagggagactgctcatcatgtgctcccagaaatttaaaaccagtgaaatgtcttatttacttactgaaagtttgtaaattaccaactgagcagtctctaggaagagcacacgtttggagtctgagagtcagacaggcttagattcaaatccagccaataactaacatccatcgagcacctctgtgcacccagcccaactctacgcacttcacatgaactatctcacttaatcatctcaatgaccccatgaggcagagccaattattattcccattgtacagatggggacaccaaggcaactcgccttcatccacacagctaatgatgaaggagctgggagggggccagggaggcagactctgggctagacaactggagaaccacactccagatgttccaacacagggacacgtctacaacatgtgcacgcacgtggacaactgtgtacacgtgcctcaggactcctctgcagatctcagagcccgtgcactagtcactgagtaagcaagacagtcatcaacagaaaacagaaatgatttctgctgctgtccaactggtgcccccattcccaccaaatggcacacgtgacaacctcagtctcacccagggccacctgacccagctgctttggctgagcacaaggggctcactgaaaacccttccctgctctcagtgcccaaggaatcctggctctcctctctccaacctctgccctgaggcttcagtactttccaagtcacccagagagcagtgggaaaaaaaggggctggtccttggctttctgcactgagaggacctctgtgggaaaccggcactgtgggtccatgcacctgctggctcccgccagaaacccggaggctgctctcccacagccacacgcccaacatgccctggttcccttgcacacgcacaggagccacaggacgcgtcctggccaacagaatgggagcagacgtagtgggtgcttccaggccaagctagttcaagtgtatgatgaacagcgtgccttccctagaccccattcatgtggctgacgaaaaagacttggatgacagaataacctgatggagtgaacacagattcttgagtcactgcttggagaggccgctggtctccactggactgtgacatgagccggaaaccaacccccagaggtacagggcagcctgttctaacaccttcgctcagcctgttgacgagctctccagccaggacaatctctccccaggcactgctcactgtgtgcccacgccaaggatggctttggaactcaagtcccagatactggaagcaatggaggggtggaggcagctgtgggcagacctgggccttcagtcagtgatcttcaacccccttgagacactgtttcctcactggtacaatacagccgatgacagctgccatcagcattccacgagacagtgttggtgaagccttagcaccaagcctggcccagagcaggccccctgcaggcacctccccaagcggatgtcagctctcagaccctccggaacctcagcaatcacagttcccattggatctcccacctctaacgccaaacagtaaccgccttcaggttcagcttcggcatttctaagcctcagcgtcccaggcacgatgatggggctgtggctcctccctcccattgagaacacttcactgcctcctcgcagtggtgcctactcagggagaacagagacgctcaagctgactgagcttacgtggctgatgagttgcagagagttctccttagcctgtgccccctccctgaggacagggactatgtcctattcctccccgtggcccctgtgtggcctggcatcatgcccagttgttctagaaaccagccaacatggactgaattgattccccaaagctggagggattcatgccattcacctatccatacagtatatattgggcattgggcatttccataaccaccctccaaggacatgttatccctgctttgctccgaaaaaaggacatgatgagatgagggaactcgtggaaggtcactgagagtaagcggcaggcccatgttttcttaccactcccttccctagagccaacacctcacactgcccgcccctcacctccacctggggtctggacccttggggaccctgagcttagttgtgtctgtgttggactctggagggtatggtgggagaggtgagaatcttcaggttaaagaattccacgatgtcccaagcagccccaggaataagccacacatgccctgggcctagcagggtaagaaaaataaagccgtctctgggcaacagagcaggcaaggacacccgagccacccgagcttcagccccagggtgcaccttgcagagaggagacatgggccccaggaagcccaaaaggcacagaggctccaggcagctgtgcttttagccaagccggcaggccacaatctttgagggctgaagatgccacagctctgacaacaagcacacaaggcaggagatgagccaccacccttggtcactggcacggcttcctgggcatgactcttgtcctcccaagcaggccatgagcatcttgcaggccccttcctctacagccaagcatagtaaggatcaaacagtcacagacactgaccctcccaggcccaagagagtggacaaggcaagggtaacaaaggaagccactgacagtccccagcagattgtcttcggtgcaccacatctgactgtcccaaagctgtggcgagggatggatttctatctgagctctcagccagatgaattcaaaggctgctacccccttccagaaacccagctaccctgtctctctgcacttcccacagaggatttcagatccaggactgcaccacctggatcccaacttccctcccagatggcaagcacgaagttagcgcgcaatgcaggctgcactcccttccaactgccaacatgggaactgagggtgtgagagcggcaccccgcatttacactcagtagagctgactggggaatgtgcaaaaataaaatgaggtgacacgtcccacttgacaaatgctgaaaacatcaagaatgcagtcacagccacccttcttgcttctgccctttatccaaaatgtaaataaaagagaaaccgttactgcttcatgaatcacacacaaaagcctgttctttactctcctctggttttctcaaagcctcagtttgtgtgagtgatgcatgggaaagacaacaggacttgttttcttttctttctttcattcattcattcattcattcatgcactcattcattgagtaattaagtgaacagagtaagtttgtgcctagcattgctcaagctctgaagatgcaacgtgaagatgaccgccaggtccctgtcctcagtgctcatactcacagcctagtgtgggagacagacaacaaacaagcaaaggaagcgactggaggcaccaccgagggctgcaacatcaatgaagtgcagagggcatgataggaaaggggggcactcgtcagagaaggcctggtacaggctaaactgtgtccccaaaaaacggtatgttgaagtcctaacccctagtacctcagaacgtgacctggttaggaaatggggtctttgcagatgacctttgttaagatgaggtcattccagagcaggtaggtccctagtccacgatgactggtgctcctataaaaaggggaaatttagacacagacccgcacaaaggaggaacatcgtgaggagatgaaggcagagatgagggcggtacttctacattcccgggaacgccaaagatggctggcaatccacccccagcagggagagatggctggaacaggccccgctgcctcggaaggagccccacttgggatctcagacttctcacctccggaactgggaggggtgcatttctgctatttaagctgcccagtttgtggccctttgtgacagcagcactggcaaatgaatccaaggcctctctaaggaaggcctgggcaagaagaaggcccaggagagacctggggaagaatgttctgaactaagaagaaggcaagtgcaggggtcccgagcagaggaggccagcgtgggtgcaggggacgggggacaaagaggtgggggcacgattggagtcagtgtcctcagagtgggggaagctggcaaaaggccatgagtgagggagttagatgcctcagtccctttggagagaccgctgtggaagttaacacaggtgaggtgtcagcaccttgcctggtacaggctgtaagcgcttcatacatggcagttgccatttttatggcctcatggaacaagggacttaggtaagattttcagaaaccatgatgcttcgaagacagcagcgggccaggggtcaggagcctggcactgacttgctgtgggacctcgagccatcatttcccttgtctggaagctgggggcctgggctttaatgagggccatagacccccctaaggcctcctggtctggctccaagaggtggtggtaagagaataagtgcccatccccaagtgggattccgacttcatgtccccagactcctcccttccacaccctggcttccggcctgggatgtttatttttgctgacaataaaaaacatatttcaatgtttgctttatctccatgttccccctagaatggcaactggcagccccggccacaagtggcaaagaattctccaagtcaaaaaaattttctatgcatcctttttaacaataaggagggaaactctgactcaaactcctacaaagcctgcatagattattatttaagccctgaagctgtactctttctatattcattgctttccaatccgaagagagcattccttgaggcagttttccaaactggtatttgatataatagtaacaaagcagccgggtgcagtggctcacgcctgtcatcccagcactttaggaggctggggcgggcggatcacttggggtcaggagtttgcaaccagcctgggcaacacagtgaaaccccatctctactaaaagtgcaaaaattagctgggcatggtggtgcatgcctgcaatcccagctactcggaaggctgaggcaggagaatcacttgaacccaggaggcggaggttgcagtgagccgagattacgccactgcactccaggctgggcgacagagcgagactccatctcaaataataataataataataataaagcattaacaaccttttaaacatcacatgaaaaggggaagttcagtactcaaaatcatttgcaaagactcggttgcgtcaagctaagcagcagcagaagctttcctgcaggacttctcagatactttaatatgttcacttgcacagagatttgcagagaggaagaagctgacactgaaacccttgcatactcacttgggagaattccagagaatgctgccaggtcacagaaatttactgacccacatctgacctgccccaccctcaatgggaggaagtcccccagggaccacatacacaccatgctgggcggggcagcttgatgcccttgaatatcttccgattagcctcatctagaaggcacatgtccacccagctctggctgtgaccctggtgagttgctgggactcacgaaggggccatcgcactctgcagactgcagcgtactccacagctctgagcagctgctcagggaatcgggtgacaaaggccagcacggatcggatcgtgcaccctgcaaagccagcccttttctctagggggtgagccctttagcaaaggagctggtgggcttcatctccctgggcagcagttgtgagctgctgagaaggcatggacacagagacacctagagagactcagggtgaaagcagatctgtgccaatgccctgccagggcttgggaaaggtataagcatcggttttcccagggtctacaaatgaaatcagcacactcaaatttgttgggtcccagtttttgctcagaggcctgtgattaagtgtcatttgttattcctgcaatcctacaggtgagagtaggaccgaaggtcatctcagccaggcctagggacagggtcaagggaggtttcctggggtgggtgatgttaagataaaccaactgtgcattggcacagcagtgcctcagggactctgaggcagcagccatgtgacctgtgagccttgtgaaaaggagaataagaaaagctggatctgctgcaataacttcctaaccagagaaggaaggaggcttcctcaaagccccacaacagccaatgccccccaacattccccaccacctcctctgggccagccctgctgagcacagacatcagaaccagggtctagagagggaccactgatgagtaatcagtcaacagtgaccacccaggagtgagggccccaggacaggactggtagaggaacagtgggagccttggggctgggaggctcctgctgagaaaaccaaacagcacttcatggaggaagccaggccagacaggaggtaagaggtacgtgtctaaggaaaggcagagaggagaaagaggcgctagagagagacagacacacacccactggtccccagggcctcaggaaccagggagggtttctcctggaagagaacggagtgtgtgaatgtgcgtgcctgtgcatgtgggtgtgtggtggggcacaggagggctctcgggcagcacaggggtagctaggtggagaggtctagagctagggcaggaatgatgcaggggaggagacagaaagagaagcaggactgcacagcagctgtgggactggggactgaggatggggcagggggcaagcacaggacctcttctggtgaggggcaggggtgaggcaccagctggcagcctttttccaaactcaggaatgggggagaaagagtgggctctgatgctgggagcccccagctccctatccaaagtgtagccccaaaagccgtctaatacttccccatgggtccctggtaagccctgccccgacaccttcctcccaggtgccctcccccacatcctgcccccagcacactgaactgggaggtggcttcagccacacagcacctgcagcagccgggggttcccatggcaaaccacccacccccaacactcccccaccccctgtcggagcaggaagatgctctggaaaacctaccctgaccagaggcaaagtgactgggctcacaaaatgcaaaaaggctcctgagtctcttgattctgacccagaaaactcttctgggggccctacaggcctcctcagagggcgactccggcccctctgcccagtctgtgccttcactcctgtatttctgtgcttttcctctccaagaatagaatggggaggcgggctccaccacagctggcccccactgggctgggagatctgtctgctctgctccccactagagggcaggccagcctgagctgcctgggggcccctgggacctcccacatcctgcatgaaggtggggactcagtgaaagcctatggctaagtgggcacataatgacccaccaagcaagggagaagcagacactgagatggaagcggcagctgtgcccactgagggagggtgaagaagccagtttagcagcggagaaggctggcatggccccagcacacacgggcagtgggcagtgggcagtgccagtgcccaggggctatgccctgtgtgggcctgcaccacagggccgaggattcagtggttccctccaacctgaggtcctggccctcccatcacctatggggcctggcaggccttcccttctccagccccaccccaggtagcactgacgggcctggcctctgggcacctgcacctacaaagcaagtcctacagggtgaacacacctccttcttttgggtcctgcctcttctccgctaggttctaggggcttcaggacaacagcctgctgtcctctgcccaccaccccctctgaaacacacagatgagctcacctgagctctcagctcactaggatgctgatctgtgggaccttggtcacattacgttgcagacattcattcaacaaatagagaccaggcactcgctgtggacttcatgctgcaccagggcagcagggatggcctcaagggcagacatggttggcagttgggccagtgaggcaaaataaaatggaggctcttccagaatgacccaaaagagtgcagtgagcacacaaaggcaggcacaggtattcacgctgggcagtcaaaagccgactcaaaggagatggcaggtaagctgagccttgaaggacagtggaatgcctccctcatctcccatgggtgtgtatatctgcacatgtacaccagagagccccaaatcaccagtgcagactgatgtgctatggaaattctgcactgagaagccaaggggaatgggaggtcaacaaatggccaaagaggccatgctgcctaggaaacaggacgggagggagggagggagggggctcaggccgcagaaacctgtctggctgctgtgacactggtgagtgggaggcagtggtctaccaggcactgcatgaggcccagaatgggaacaaccatggctgtccagggcctggtgcccgacagcaccgtgaacagctgcctcaccctcctgggtaccaggaggtggcagaggcaggtttcaacccacccaggtcggtctggaccagagcctcctgcttcagttactgggcctgtcacctcccaccagaaaccagctgggcccagggcctagccaggagaccagagaggtccaaggcctgggctaagggtggcaggcccaggtggatgtatgtggtgccaagtggctgcctcttcccagcctgactccggcacgtgatgactaatttgaattgttctaattcctgaggagcatcctcagagtttggaaacaggtgggaggagcactcgccaagcccaaggccaccctttccaagaaagggctacgaaagcaatggtggcgtcagtgagacctgcccctccccaggagcccaaggtcccaggagcccaaggtcggtaacttcaagagctgcggggagcagaggccacaaccggagggacactgtccccgtcctactgggaagggccgctcctatagcaaccagccctgccccaggaggtccacatggtgcagtggactgcaatgtctaaagggcatccggttgaggccacaaggtcatgctctgtgacagcgtgagaagaactgcaaacatctcactgaggtttaagataaaccaaagatgctgagagaacaaatgtgacaggctcctcagtattcacggctgctttcccgcacgtcagacacagccaacaatgacaaacacgtgacctcctccgagaggctggtgggagcacgtgccccatttgacccccacggctcttgctgtttgctggtggcagcctctccacaccccctaacccccagccactctccccggcgttctgtggcccacacccctcatgactcaccaggctcagcaccccaggggccgggtgagggctctcccccaggaacactgcccctattctctgggctctgggatcgttaccaacaacccgcaccgcattctctcccactcatctcaataccgcaggggaggatgcagcccccagaacttggaaatgccaagaaaaatccccccagagcagagcagagaagggctgagagatgctgacagctgccaaaaagggacctacctgctgtcaaggggtggaagccccaaacctcagtgcttgtgactgtcagagagctgggaaagccacggaacacacagagcctcccggctcggcgacaatgccctggctgttcccccggcccccaccccctaacaatgctccttttttcttgggcactgaccctcacttatcagggctctgtcctcagaagagcctgcaggcccaggcagctggaccagggaggccctggaaggctgttcccctgctccctgggtggctcctgctctgagccaggccagtcccaatccctggggcctacacaggaagccccggaaccacagcaattctccctgccaaccctctgaccccgggacaatggcatctccatgccccttgcatggtcaacagggcagtgttgataggaaaagaggagaccagcatttctcagcctaggacgtcagatcctgcctgcatttcaccatgggtgtgtgtgggtgtgtgtctgcctttctttcaaacagatggtcaaggtcaaactcactgaaaattcaaaatttggtaagagttattaaaggtatttcaaggaatgtgacggttgggtttcactgctggaataaacagcagccactggctgaaggcgcaggtaagcttcaggatgtagccccaggccccagccacctagatgcaccttacatgctcacctgagcagccacctgcaaggctggctcccacttcacaacgggagtccaaggccaggcccaggactcaagaactcctactggcgagcccggggctgagattcaaactcagcttcctgacaaggtgtggtccggatgttaaagacaaggaagacagaagagtgccacctggggctctaggaacccttaacatgacccagctgcctcctgcagtggagatggtgagactcaggcagaataaagataccagctgtgtctataaagtaatacagcttttcaaaaaaactgtcttttttctctgatcaaattaatgtccattgtaagagatgtttatatctccagttatttactcagggatcgaaaaattttaacttaatctcagagatagcctgtaacatttgtattacataacgtactcctccaagtttttaatatttatctttgctaaaactgaaattatactacacaaacatctggatcctactttttaattaacaaactataaggaatatattcctgtgacatgacatattctttttttttttttgagatggagccttgctctgttgcccaggctagagtgcaatggcacagtctcagctcactgcaacctctgcctcccaggttcagcctcccaagtagctgggactacaggtgtgagcaatcacacccagctaacttttgtattttttgtagagacgtggttttgccgtgtcagccaggctggtctcaaactcctgacctcacgtgatctgcccacctcagcctcccaaagtactgggattataggtgtgagccaccacgtccagccaacattgcatattcttctaaagcattatcattaaaaggtaaatcaagcataatttatttaatcaattccctaccttttaatgtttggttgtttctaattgtacaattatacataacacaggaaaaatgattaaattatatccatatactctcttttggaagggaaagaaaagtgggatatatgtgggtttttgtttgtttgtttgttttttgagacagagtctcactttgtcgcccaggctggagtgcaatggtgcaatctcggctcactgcaacctccacctcctgggttcaagcgattctcctgcctcagcctcccatgtagctgggattacaggcatgtgccaccacacccggctaatttttgtatttttagtagagatgggtttcaccatgttggccaggctggtctggaactcctgacctcaagtgatccacccgtttcggcctcccaaagtgctgggattacaggcgtgagccaccgcacccagccagatatgtgtttaaaaccggaaaaccattcttctgaagacaaagacataagtgccaagcaactatctaaaaaatgcatccagtggaaaatggcatttcctggacatgccagaaaataagatactctaataccgttcctaaaacctgtgacctatttcttgctcagtttttctctgaactgagccccaaaagatgtcccaagttgggagttaagttccctttgctaccaccgccgaccttgctgccatggctacagcgtccgcctgcatacgcccagctctcacgggggtgctgccaaactcaagagcccaccactgacttcccctttcctactaaacgatgcccagagttctgggcacaggccttttgggcaggctctggccccagcatgctttgggctccctctcctatttgctccatgctcaccatacccagaaacaccccccacctccttgttctacagaggctgttctctctccttctcagctactcaaccttctctcaatccatgtcaacaagacgcctcctctttttttgctaggcatggtgactcacacctgtaatctcagcactttgggaggccaaggcaggagaatcacttgagcctaggagttcaagatcagcctgggcaacacagcaagaccccttgtctacaaaaaaaaattaaaaacagaaacctcctcttccaccctgtgcctgctggagactttgtatctttaccagcccaaggtgcttggtgtcagatccccagactctggaatcttgaatccgctgctcgcagatctgactggtcacttaaaccccactgtgcttctgtgaccactgaatgggggaccaggacgcacctacacctcacagggtcgctgtgataagtcgctgaggccgtctcagccccacaccctgcagcaggccagcaagctgtcaggctggtattcagcctcaaaaacacttgaggagctaaactgggagttctccctgccaaagtctcccttgctgtcagtttcagtacaggaagtacagggtggttgggaggggacaaatgacacctttgcttctccaaggccactgagtgttcttactggccctctgtcctccccacagggcctcctccagagggtgtcccgctgtgcagggcacccagaaaccctctggatggggtcagagcgcacacgggtgctcctgccagcccctgctgggaggcaccccacctccaactcaggctgacgggaagaacgcccagtgccacttctattaattcagccaatgttttgttctttttggttaaactgccttaatctttaaaaccgcatatccacacgtctggcaggctctttatgctcatgatttctctgggaggagaagcaagacagacttcatagccacttacagaccagaaaactgaggactcagagggtctgtgtcagggtggacaatggggagcctgggcttcagctacatgaagcagagctttgcttcctcctatgaaagcagggcctcggcccaatgtccttcactgtggcctggggtataaggacagagcaggggtagggaggggagatagtggaggagaggcggtcttggtccactttgccactccccacctgcagaggccctcaccaccaacagaatgaggtcaaggcccctggccagagcacacatggtcccctgccacaccgcttggcccaacacccctgcccaggcaccctgcagacactgtatacaccaaatacttggagttcccccaaatgctaagctggctcgtgccttgaggcttcctgcacgcagtccctcctcttcctcaggacctggtgagctcccagccttctctgaagggcccattcaatgcccccctctcccccccgcaggaggctgcccagcactccctgagcaggaagtagctctgtgccccctctgggtcactgccattctctttctctggtgactgcctccctctgggtggggccgtatgcagctgtaggaaacagccaagcttgggaggcaggagaactagaagcaaggtcctggctccatcacctggatggaaggccctgggaactacttcacctcaccaaggccccgtcttctcccctgtaaaaaaggaaggatcctgcctacatctcgaggtgtcgtgcacattcaacaagataggatgtctatgcactgagctcagagcagaagtgtaactctaccactccccatcaatacagagtgtggggggagatggttggtctcgtatatacgacagccatgaacctaatcccctgtcaggagggggctattttgatcagtgattagccaggcgctgtcctcaaccatttactcctcacaaaggccctatcccacaggcactagcatcatttacatttcaaagaggctataaggcaagggccaggcttccactgcccggccaggatctgaacctccctccaggccctctgtcctacaaagtacctttcaaatgccccctcctccaagaagtcttctctgactcctccctgcggccagaagtggcaaccctgtctctgcacagtattgcctgggcatccttccctcctctcagtatgagttactctgaggcccagagaccagcaggttctgggatgtgagcaccagaaccttcctggggctgacctgagcagcaagggacctcactaaaaggccactgtgcaggtcagaaaacacaggaagctgggagagccacgctcagaaaccgggcctctgccagggaggctgttcacccagagaagcacagtgaaagtaggccctgtggcaggcaggcaggcaggcaaggcccctgcccagcccacacccgggcacacagggctcagcatcccatctggcacctgcctctgccactgagccaccatgacgaatgctccctgtcctgcttcctgaatcccagcaccagggggtgggtctggctggcaggccccagtcctgtgctcgcacccagcactacaggtgacaagagttcctggcctttcctgtctggcctccaagatacatatggaagagaatcctcagatgtaaactcagagggggttcagatgctaggaactcccaaaacacagcaaatctatcctgcagccccctgttaaccatatgttcctggtagcaaggaccctatctcacccagcctgtgtcccccgcggtgtctaatcctaagggccacctactaaatgacaacagcagtgaccgcctaccacacagctgccatgtgcaggtgtcatgctgggtcctcacagacttcctctcacccagtcctcacaacacccactgcaggaggtacaaatcaagttattttataagttgaggaaattaaccttctagagaacaaatgactcaagtgccctgaatctcacagtaacaaatccaagattctgacacaggtacagcaaactggaaacacgttttctctactccgccaccctgctgttctagtaaacgttcattcagtgaatgatagccatatgtgaacagaaagtggctaagaacaaaaacagtccctctctccccagccaagcagcttcgaccctaatccctgagtgggccttgatgctgggggttttggaacatgcctggcacatgtttgggtcaccaaaaccctcctaacatgcagccatttgccaaaaggatttgtttgaggctgcgatctctctagttttgagggtgctgatcggatacccctaacagcgacagggctgggaactgggacaaggcagagctggacttaacacggctttgaagcaaagatccaaaactcaggccagtgccccacctgcatgtcctgatgggcctgacagggcactggggcttgtggggtggctgcagcgctcagagggagaaactggtgggcaaagaaagggagaagggcctcggacaaggagaaggaaattaaagtttcaatcatggctggctgcggtggctcacacctgtaatcccagcactttgggaggccaaggtgggcagatcacttgaggtcaggagttcaagaccaacctgagcaacatggtgaaaccccatctctactaaaaactcaagaattacccaggcatggtggcgtgcacctgcaatcgcagctactcgggaggctgaggcaagagaatagcttgaacccaggaggcggaggttgtagtgagccaagatcgcaccactgcaccccagcctggtgacagagcgagactgtctcaaaaaaaaaagtttcaatcttaactctacaaattgacttgaagtccaaactctttctcatccagctactgccagctccccaccgaggcccacactttggggaaaacccttagaaacttcttgtcattggttaaaaaaatattgacccaggattggccacgtgggccacaggtggtttcacagcacacacagaaccagaagctggggctcagagaagcaaaataacttgcccaagatcacacagctaaggagatcggattgaaatccaccccagtttatgtgcacagacagaaggggagaaaagagatgtggggcaggtggatttctgagggcaggaaataccagtgggaaagccgaagacagcacagtagagactgcaaaagcccagtgctctgtggagtcactgcagaaagcaccgaacacatccaaggctcaacccatcaggcactctttcctttggggctacttccaacaggaaattccaagtgtccctgtcaagcaggggaaatgccatcctgggtccaaggcagcagggcagcctccctgccccgcccagccccacctacatgaagaacaaagtgcaccaggcaggaatgtgcactcaggccgtagccagcctcagcctggctcattcttatctgtggcttgattaaaacaagcttggattacaccacaatctttaagccccaaggctgggggtggtgtcaccaggaatctgttccaagcgcacgtcatgcccaggccaccgttctccttcccctcattggtggcaggctggcatcctgcaggaggcccttcccagaccacagccccacccttcctctcctgccgcccacctgaaggccccaatacacatcttcctacagttctggcttcaactctgttcctgagacctttactgccccaagtccactaccctgagttctgggcaaatgaaaaatcttttccccttcaccagatttctcaaatccaaccattctggaacccggcttgtggatggctaggctctagcctccctcctcttctgtcccatcaccctgggaagacagagccagagggtactgaggaattcaggtgggaggggttgggggggaggtgaggagggggtcctaggagcaaatggagggtcacaaactgaagcgcccatggggcaaatgtaaaccatgaggctggtggtgtgggacaacagagaatggtggggcctaaggggcaaccagcttaaacactggcaacaaattcaaaggaaagaatgtaaaattcctgtgtgggccaaacagattgcatgcaggcccaggtatatctgagtcacccacgtgtaatctggtccaaccccctccgcagagataggaaagctgaaatccagacacaaggaagggaccatgaataagtttgtgctggcgattactgagaaagtctagcataaaaattaaaccgaagcctaggccgaacactggcatccctctgcttggctgtgaagctggtgaggatgctgcactcggcctggcagcagatggaaactctggaactcgagggccacggatgagccacagggccccccaggtaaaggactgacagccagccatgcaagcccctgggactgacccagatgcagaactgaccaatgtggcgacaaccatcacccaaccctgtggggctgtagatctcagaggaggtgggacagtggcccagcggacagcaacacggcagagagggaagaagggtgtggcctctgtctatggcctggccagaagggccaccgcaagcaccaaggctagcaaaggaggaagaggaagaagcaagaaaaacccgacaccgtgacggactagcgtgggccgcaagtcagggttgtggttctttaggatatatcttaacagggtaagggccttaaatgccctttccccaccaacctgacagggtttagcaccaggactcctggccagggcaggccccagggctctaggatctgtcagatcaggaagaaaggggcatttaaggtctccctcctgtaagatctaccttaaagaaccagatccctgactttgcagcccagtgccatgctgcttttgagcctgaaatggaagtctgtgccttagttccaagtcaccaggcactggttccttgcccttgcaggcacagggcatcaagatcaaaccaaacctccaagcctcacctctcacaaataagcagaggccagttacccctctgggcaagacctcaggcccctgtccctgccagtcagcagctctgcctcccgcagcgcttgagggctggtccatgcagccggccaggaaaccacagaggccaggtcagagtggccttttaattcaactcccctggtgaccctgaagagcactgccgcagactgagaggctggaagtaggctatgctgcccctgccccataacaaagactctacagcaaatcaccaggatgggggaagattagcgcaaagtgggtggagagtctccctgaaacgtactgacagcacttaaaaaccaattagatggcacgtgcctgtagtcccagctactcaggaggaggaggtgagaggaggatcactggagcccaggagttcaaggctgaagtgcgctatgattgcatctgtgaaatagccactgtactccagcctgggcaacacagcgaaaccctatctaagaaaatccaattagagaccttggcttacatgcaatcagagaactaattaacaaggaccagtaattaaaattaagctatactctctaattcagacttttttttttattctttcagaactaatttcaggatccagtttctagcctggacacaacccaatccaccctgggccagaactgccagaataccttccctgaaactgtcctctgcaactacctaaaaaccttcaatcgctccccagtgcccccaaatgaggacccacgttgcctccgacttcctttccacactcacagctcactgcctcccaagcggtcactgctctggcgggacgggtccaccagtggtctgtgagccgggcctcaagccctcaccaggcacacacagagtcctttttgaccccatccccaccccacgctcttttcttctgcaaacctcccagtgtggtctggggcagtcaagccgcacccctccctcctgactctcagggcatcttgacctcatcgcccaggctgaccacaagttccaaacaggactttcttgtggccattgctcaggtcccaggcatgcacaaacccactcacagacacttggctgagagaaatctcaaccattagtgctactcccattttctattctgaggaggtagaaactgaggctcagagaaacagcgctagcccggggccccacggtggggacagcagggtctgcacagggttggcctggctcaagcttcctttcccacatggccccatgtgctccagataaaggcaactatgaaccatgttcctgtcataaaggagataagacatacacacaggatatggtgattgggcaggacgcaatttagtgctcagactttcctaagtgctctgggcttcaagaccttcagaaaaaggctaggtaagcagggatggcccagcagccgggggcgggggggggcggcggggggaacacaagcaaacagaaacatctccaaatgagtggtcaactggaaagcacagggcagaaacaggagactggtgtttttccatttctttcggactgcacactcccacagccttctcccacagcagatgaaaaactagtgaatgaataaaagcagcaaacgatggttcattaccatcaaagctcagtcactagctagcccacccaggctgcgaacccccatcagaagctctgctcggtggaactcccacaaggccgcacatgcagcccagcacctaggctatctgaggcccatgctccagcccagagcaggcggctggtagggaaatcacaagggcctccctgctttgggtctcccttccctctccattcacctccaactaaactaagcgccccctcctgcagagttaaagaatggaagtcaggaaagaggggaccgaactgggagagaagaatcagaccaatggaccactccggactggaaagctggggccctcaggccaagccgggctgctggtgaaccattaccaccactgcctttgccaagtttccatctgtggactgccctcaacttagttcccttgaagaaccttcctccccgacgtttaagccacgtaactccagggggttgacccacactcactttggggtgggcaagtgatacagtcctggccagctagagtatcatgtcatccagcccaaggacaggtgtcatgggttgaactttgtcccccaacaagataagctgaagtcctaacctctggtacctatgaacatgatcttacttgaaaacagggtctttgcagatataatcaaattaagatgaggtcatcagggttggccctgattcaatatgactagtgtccttataggaaaaggagaaagccaggtgaagacacagacacccaggcaggacggccaagtggggatggaggcagagactacagcgatgctcccacaagccaaggcgtgcctgggactatgagaagctggcagaggcaaggaaggctcctcccttcggggcttcagacggagcagtgccctgctgacatcctgagtccaactcctagcctccagaactgagagtgaatttctgttctcctaagccacgcagtttgcagtgacctgttatggcattcctagcaggcaaatatgatatgtatgtgacccaagccaggccaaccagagccagccagcaccagccagcccgacatctgcttcctgcagggctgttaagccaaggggatgaagctgcaggcaaccagtttcacatgacttggcacaagcccacccaaaatgactttcacaaggagcatgaaaagtgaagaaatatttctgatgacaatacatgtgagttcttaatggcctgaaacctgccagacctatctctggaccttctgagacattcaggccaataaattctatttattgacatttccttaagatttttctttcatattgacagctgctacttacaacctgaagaggctttacattttctcataacatggtgaacatggtatgatttgttttctgacataacatgtccaaatgaacagggtgcccaacggtcatccttttgggcacctacatttctgacatcgatggtagtaacactcaaagcactggcatccttctctttggcaagcgccttcggccttcaaagctttgtttcaatgatggccagtctttacgtcaagggtgcatttggttttcgtataacaaaaaacaattccaacaagctcagaatcatgagtgaagatgtgtctggttttaagtggtgactaaaaatggctttaatcataaggacggaacgttaggagggagtggagtctccagggtgtttcaacaggttgacatcagcaagaacccatactcctttcaagtttctattctgccatgctcgccatggtagacctttgtccacgtgcctgtcgcctcacgctcacaagacagctgccaaagctcctgatactcccacaaaatatctggaagcggggaagaaggggccagggcgaaatagccaaccctttgaaagagaagaaacactctttcccagctgggcgcggtggctcacgcctgtaatcccagcactttgggaggccaaggtgggtggattgcttaagctcaggagttcgagaccagcctggccaacaccatgaaaccccatctctactaaaaatacaaaagttacccagatatggtggcacacacctgtaatcccagctactcaggagactgaggcacaagaactgcttgaacccaggagccagaggttgcagtgagccgaggtcacaccactgcactccagcctggacgacagggcaagactctgtctcaaaaaaaagaaacactctctccagtcatgtcttactggttagaagtgcacataacatgggcacccccactgcaagggaggctgggaatgaagcatctcataacaggctcaggccaatcatcactgccacccagaggaaaagggacagtgtagacaatgagaagtgaagatctgctgagaaggaaactttgcagatattaatgatactaaagaataacagattccatttgccctttaaaagccctacaaaaccccttctgtggcttctaggtagacctggggggaaagtcagcaatacacaagaatcctgtgtggaaggcctcctgcatgcagggctctgtgctaagtaccaaggtgagtgcctgcgaggagcccacaggtaaacacagtcggctcagaggaggtgaggggacagaggggaagccaggaatgcttctgccagcaagtgacatctggctggagtaggtcggaccagcaagtgcagaggcagggagagagtgcgcaggtgttgctggtgtctgagttgggaatggcagggggtgaggctgcctggctggcaggaccaaactgggaagggcctcataaaccattctccagggcttagactttaacctaaagacaatgaaaggccaggaaaggttagatcagtggagtgactcagatattctcgatgaaagatcattctgccaggtgggggctggactgagggtgggagagcccagagctggggatgccagccagaggcttggcaataatgggtaagggggactgggagactgaccggggtcacagaacagaaggacgggggtggggggtgggtaaggaaatatccagagggaaaaatcaacagaacctggaaacagaaaagatgtggatgtggagggacagaggcaccgggctggcagctggggtgggagatggggggagaccttcatgaccatctaagaaaacacagcacaagcagatttggaagggacagagggagtcaagttacaaacacggtccctccaggcagaggcacttggcaaaggttctaggcctgccatgggggtgggcgccgacaatccctgctgctgggaagtgcaactcctgctcagcttccctttcgaggaatggccttcccggggcaaaacaaaggccagggggcagcaggccgtaggaaatactctcactgccttaaatagaagcaaaccatctggccagttggagaaagtttacacaaggaggactgggttgcactcggtgcattttaaagaaagcccggcggacacacgggttctcctgctggtgctgccagcctggaaaatgacagctgagactcaagcaggcaggatcggctgcctcatctccaattcccgtgtgtggggtgagaggaggtacttccactcccctacctggctgcaagcccccgaatatgtcctgtctagggaggccctgctgccacacagcaaaaaataagtgattcactcttgagttccacgtgctccaaatggttctccaagagcccccaagtgtcaacttctgtcctatccaaggcaagagagaggagcaagggctgatggcgggcacccagggatcgcaggtggccgaatactgcagctggcttttgaaggcatcgatgcacactttgagggcctgccttggctcctgcaccccacctcagttcgtgtttcctccctttattctctccacccagaaaggtgacaaatccaagccctggatgtgaggggggtccacaagagtaattctggagagatggggtcaggtgaggaatggttagagacccagggagccaagtcacgggacctcagtgaccccatggctgacctaccgagacctccagtcgccagcatcgggtaggcccacacgtgtgggggaggaagtgagtgtcactggcccatcagcaagcagagctggcagaggtacctgtgcaggcgagtccaatgcccagctctttaataaacacgccttgcggtgctggaagagactcaaagtccatccaagacagattctgtcttcccactaaactggaagctccttaaggaccgggatgtggcagttttgctctcagctatgtgcccagtgctcagcacagggcccggcctgcctgggcactcagaaggacacctgacggacaaggaaccaatcaaacggtgatggccacactccacccccaggacctgacagccaacagtcatcacgcacctggcaggcccacagctctctgcacatacacatgcctcaatttcccaggcatgggggagctgaatatcccaggattctgccccagacaccatggttttcaaactctctctgacctcaaatgtctttcctgaaatgaaatctaacatgcagaccccagatcaaacacagatcaagagagagtggctgggaaaggtggctcacacctgtaatccctgcactttggaaggccaaggcgggcggatcgcttgaactcaggagtttgagaccagcctgggcaacatagtgaaaccctgtctctcctaaaaatacaaaaaccaggcaggcttggtggcgcatgcctgtaatcccagctattcaggtggctgaggcaggggaatcgcttgagcctgggaggcggagattgcagtgagtccagatcatgccactgcactccagcctgggtgatggatgaaactctgtctcaaaagaaaaaaaaaaaaaagaaagagctgctcaggtgaagggagtggtgagcaactcatcccccttgaaaagcaggtaccccttcaaggaacccctaggggtgcctcatagccaagcgtgaaagccaattcaatgagaccggaaaccaccctgtgcctccaaatgtctcagcatggggaatggaagacagcagattgggcggaagcccttccattgtaacgctaactcactccctaatccctgccactgttatggctatggggtactcacctctgcagtttttggctaagaaatgccaagaataagtacctatttcaagaacaactctgttgtgagaaattccagcacattccactctgagggcaccaccatcttcacccttttgtagctggagcttgcaccaggggagcgccttcatctctgcctggaggggccacgtggtggaaggggaataagacagcagaaagcacagagatttgggtggcagagtccccaggccaaatcccagctctgccatttaaaagatctgtgaccatgggcaagttatttaacctttctcaacttcaatttccatatccaaaaggtaggataattaattgtccctgcagcttgtaggactgtctttgggtttatatgagggatttttttcaagtgctttataaaccactcccaaatgttagctctatttacactgattttattgctgggctcctaggaggccaaaggcaacagacttagtttccactaaaggtcttttattacaacagacgccaggcatctagggcggcctgttgtctgaagaacagcctgattctcccataatcccaagctctccaaggtctaagtctcgataccaggccctggctgactctctgacccagggaggcctggtctgggttgttcttaccctgggggccttatctgtccttctgtgagggccaaaggaacccccagtggggtagggggacgggagatccttcagtggggccagagacggcctgagagtgactcagtgggctggaagttcgcccccaagcctcaccggccttctggctcactctatattcaatataatacctgcccgcaccaccaccctccctccaaacccaggtccccaaggggctggtggtacaggaaacagccctacatctcccatcccagggttcagtccctcactcagaactgggaaaggggccgggcacaatctcccagatgccccaaagacttggaaagcgctctggtggctttctgagcaggcacatctggcccaaccacacctttcgtcaccactgtttaaaaccagtggttctccacatggacacaggaaggggaacatcacacaccaggacctattgtggggtggggggaggggggaagggggagggatagcattaggagatatacctaatgttaaatgacgagttaatgggtgcagcacaccaacatggcacatgtatacatatgtaacaaacctgcatgttgtgcacatgtaccctaaaacttaaagtataataaaaaataaaaataaaataaaaaataataataaaaaaaaaccagtggttctcagacagaggggctcacaagcagggtcaacatcacctggatacctgttacagatgtggattctcagccccctcagacctactggttcagagaccctgggaatggggccagccacctgtttgaagatgtgctccctgggggttccagtgcacactccagtttgagaaccattacttcaatccagtggttccccacccgcccctctcccggctgcctgttgtcctgggggcctcatgacagccagtgctcaagagctgccccagagatctggatataattgatgccaccccatcagcacttctttttagaagtgctttaaaaagaacaggcggtgcagaggactttcacggtagtgaagctgctctgtatggtatggtaatggtagatgcaggtcactatgcatgtgtccaaacccacagaatgtgcaacaccaagagtgagccctatgcacactggggacttcaggtgatcctgatgcacccagggaggttcactgattgtagcaaatgttccaggctagcgtgggatgttgacagtaaggggggctgcatgtgtgtcagggtagggcagatacgggaagtctctgcaccttcctctcaattttgctgtgaacccaaaactgctctaaaatagagtctattaaaaatcaatctcccaggtgactgtgattccagtagtctctggagcctgggctgatgtttgggaggtagacgggacagccaggcttcagaaacagcaggtaaaactacccagttgtggagtcatctgggaagattctagatggagggaagtcagactgaagtagggagagatggggtcggggaaggaagcgaagagcaaaggcttagaagcacttcctggcagcccacccagcacttcatgcatccaaccctgactgaacatcttctttccccacatcccctccaccctgtcagtgggtcaagtgctagcctgggattcaccccacttagaggtagagtccccacttctagcaagtgaaccgagccagtcacccacgtgtagctgctttgacgtcatctgtaaacagggtactgtggggctggactaagacacagcccagtgcctggcacagggcaaacaagtaataaacgcaggttttaataaactgattgacagaaactggagcccatgtctgctgcatggaaaacagcatccagacaacgggtggtcttatctcctgccagtaccacctctctggcttggaggttagacttaaagcacaggagggaaccctgtttctccatgcccagaaacagaccctatattcccaaagacaagctaaaaccattgggaaaaaaacaaaaaaccattcaatctgtaaatgctcactgtctattctaactagacactgggccagggggtacagaacatgtactcccttgattacagagaggctccagtccagtgaagagcaagaaagatgccgctggggctactggcttctcaccaggtggttcatcctcggagcctgcatcactcctggcaaggagagcttcaggaggggcggtggccatgtcctgatatgtacggtggcttgagaaccaatgttctagagaatctaagggcatatattacagaaaacagcactctctctgcctctcatggcttttttccccttctgtttctttcttttataagcctttcactgaagtataacataagaaaggaaggacatgccataagtgaacagcttgaatatttcacaaactggcacccaagaggaagactgaggagaggacagttgcaagacaccagcaggctcctcacattcccacccggcaccttgtccccaaaggtgaccgccagcctgcctcctgtccccagagagtagcttggcctggtcaagatcttcatgtaaatggaatcagacactgaatacgcctctgcacctggcatctttggccacgtttcatgcctatgggactcatccatggttcattctcactgctgtattcgatacaactccatggccagatgataacacaggtcatgtacgtacccattctacagccaatgggcatgcgtgctgtctcctctttgaggccatcaggaatgctgctgctgggaacattcattctacacgtgtcttttggtggacacagccctcctttctcttgggtacatgccatggaggatttgcagggccaaagggtcagcatctcctcagctttaaccaagccatgttcccaaatcccacaccagccctcagccccttactctccttcatttttctcccagtccccctcccccacctcactcgccacccacacttctttctgttttcagtctctcaacctagacacaagtgctccacgaaggcagagggatttggggtttgtttactgggactctcccgagcctcggtgctgcctggcccagaacagatactcaagggacatacaaatgccacctgaacttctgcactcacctgcgcatgagctcgggactcctctcagctgtcccctcccatgcctccctcccacagcgcctttccaaagtccaaggacccatccttatccggtcctagccccaactgccagtcaggcctcaggtagaaactgaaggtgcccagcggtccctaccactccccgggcagagagtacaggctcttggaagaagtccagactcaagtctcagccttgtgaagccagctgactggagtggcaatgactccacagaccttcctgagcgctggctggggtctgagcacccagcagacgggaggagcagccggggcacccagtgaggtcacggctagggaggtgaatcaggcagcctgatgaggctggggcaggtgaggtgtttaggccacaggagagctccagtgaaactgaacatcacccggtctggggaaaggagggagggcttcacagaggaggtgtctcaagagttgcctcttccaagatgtccagagttccccagatagagaaggctggggtgactgtgtgagtagagactggtgtgtgcaaagcaggagagtggcctgggtgcagcagggttgagaggcaaagcccactcctggccaagcagagggaactgtcggggaaggagtcagaaagatcacagggaggacggtggcaaacaccaagaaccgccaggccaaggcctctggggtcacccaagggcagtgtggcatgtgagggcttctgcagcttacccatgctgagaaggtgcctgaaagcttggtgaactgcagactgactcagcaggtctgggggcaagggagtctgcatttttcatgggcgccccatcagtgcagctgccactggttcccagaccacactgggagcagcaagggcttagggaagcagaattaggagacctcagcagtgcacccccaagggaagagggaccaagaggggtgcagtgatgttgaagaggaaccagggtcttaagcagctcagtccacccacggctgggtctcagtgcagcagccacagctctacttcacaccaccagcccattccagaaccttctataccacctcagagcagtgcccctcctccagagcctggtgttgccatggcaacagtccacaaacagggggagcccaggcttcagtgccataaacaactctgacagattcaacaaataaagatgtactatagcaatttgtggggaatttatgagaaattaaaaattcaacttggacaataaacaacccatttcagaatttgccccacttaaagttaaataaaccccatgcaagcatttttcaagcatgatgtttcaaggctaaaaacaggccctgctgggaatgcttcctgagcctccaaaactgggtgctgctgggagagcacatcacataactgctcacatcacagggcacttttacagcttagaaagcgcctggctcaccctctgggtgctcccaaatgccacccgggagaccataggccgaggatgagtaatgctgtcaggattatgagcctcacaggcgacttgcccagagcacagtgactccccagggtcacaaggctggtcaaggtcagaggcagcgtgcaaacccatcacccagactccaaatccaccacgcatacacaggcagccatgtgtgcatttgctatacacagaaacactgcacccaggcgaggtccaacgtggagagctagctgtgttctctcgaaatctgtcctgctgaaacagcacccaaagagcctgcttcaagcagatcgacaaattctcccacatgcacactcactcacacattcactcactcacacacacttgctcactcctactcacttgctgcccagggggcgagaggcctcagatccctggattctgcagtatgaacagggcaacctcaccaagctgacttcaagatgaaaggctaagaaaggaaacagacgtgcgagtacacctgggagattttctagccccgttttctgaagaatcagggatttacagaaggtgagagtgaaacgggacccatgagatcctatcagctgtcagacagagaaagaagcagagcccggccgaggccatgcagggaggagaggcagaaccagcagggaccccagtctcctgcggccccagcctgcagcacaggcagccgtggcttcatgctctcccatgggggccacacgactcagggctcacccaccaggcaccctcctggtcattctcaccatgcttggtggcgctaggcaccttgatggagagaaaaaggatcatgacccacgattctggcatcaccacatgctgtctctcaaggggctacctactgacaggtgggagaaacccatcagctcggcgagagccctccccagctccctggcccgatcttcccaggcggccccatggttgtctgtctccctgagctactgacgcagaagaggtcaaagacttggtcatcttagagtccctagagggcagcaggggacctgccactggggcctgggtgagcacccagcaacagaaggaatgaagggctgagcccctgttagggccctgggcctgcaagcccatcagctcccttaaaggatcaatcataaattgatgacagaaatgagccatggggtgatggccacaggggcatctgggagggccagtctggaaggtcgaagccagagtggccatgcgggactctgggtagggacagaagaactgggtccgctctcacagaggccacgggacacattgctgctctgccttgaggtccacagggtcataaggcaggggtggagggggtgtaggtcgcaacacaggggtggagggggtgcgggtcacgaggcaggggttgagggggtgcgggtcacgaggcggggtggagggggtgcgggtcacgaggcagggtggagggggtgcgggtcacgaggcggggtggagggggtgtgagtcacgaggcggggtggaagcggtgcgggttacaaggcgggggtgggtgctggtcacgaggcagggtggagggggtgcgggtcacgaggcaggggtggagggggtgcaggtcgtgaggcaggggtggagggggtgcgggttatgaggtggggtggagggggtgcaggtcacgaggcaggggtggagggggtgcggatcatgaggcaagggtgaacggggtgcgggttacgagggagggtggagggggtgcgggtcttgaggcgggggcgggtgctggtcacaaggtggggtggagggggtacgggtcacaaggcggggtggagggggtgcaggtcgtgaggcaggggtggagggggtgcaggtcacgaggcggggtggagggggtgcgggtcacgaggcaggggtggagggggtgcggatcataaggcaggggtggagggggtgcgggtcacgaggcggggtggagggggtgcggatcatgaagcaggggtggagggggtgcgggtctcgaggcaggggcgggtgctggtcacgaggggggtggagggggtgcaggtcgtgaggcaggggtggagggggtgcaggtcacaaggcaagggtggagggggtgtgggtcacgaggcaggggtggagggggtgcagatcatgaggcaggggtggaggggggtgtgggtctcgaggcaggggtggagggtgtgtgggtctcgaggcggggatgggtgctggtcatgaggcaggggtggagggagtatgggtgacgaagcaggggtggagggggtgcgggtcctaagcaggggggagggggtgcgggtcacaaggcaggggtggaggggggtgtgggtcacgagacaggggtggaggtggtatgggtctcgaggcgggggcgggtgctgatcccgaggcagggacggagggagtgcaggtcacgaggcaggggtggagggggtgcgggtctcaaggtgggcgcaggtgctggtcacaaggcaggggtggggagggtgctggtcatgaggcaggggtggagggggtgcaggtcacaaggcaggggtggagggggtgcgggtcacgaggcaggggtggagggggtgcgggtcacgaggcaggggtggagagggtgtgggtcacggtcacgaggcaggggtggagggggtgcgggtcacgaggcaggggtggagggggtgcgggtcacgaggcaggggtggagggggtgcgggtcacgaggcaggggtggagggggtgctggtcacgaggcaggggtggagggggtgggggtcccgaggcaggggtggagggggtgagggtcccgaagcaggagtggagggggtgcaagtcacgaggcaggggtggagggggtgcaggtcatgaggcaggggtggggggtgctggtcactccctgctcacccccatccacactgcctggctctgagcctgggaggctgactgccgtagaacgcagcattcaagatccagggcttccagttgcacttggccaagaggggtcactggcaggagaccagagggcaggaggaggggggtggggtatttagtcccctctctctccctgcttcagtgacatgcctgggcagtggctgtggcttgctatgactaccatcacagagcttctgcgacactttcttcaccttacctgcggcccaagaagcagaacagctcctctctgctgccaggctctaggtgcctcaccagcccccgctgctcccttaaccctgcccacagctcaacaaacagcccctgctttcaaggctctctttgaaccactgagggtgagctctgcttcctgcaagctccctggctaatatgaagaggaacacgttctgggtcaccacacatacagggtcagaagacagggagcaaatttgagccacagagacgagcacagaaccaccaggctacgtgggccaggcatgcaccctgaccaggagagaggccaggctgagggtacacagtctggaacaggcgagtatcagcatggggacagtgaaacaagctcaggaatggaggggaccctgctctgctgcaaaaggcccatgcttgcaaggtattagggggctgattgtgtggtagccttggaaaattcaggaaggccacgggaggtttttatgaggaaccagagaggtctggttagcactggggaaggggcaggggatggaagagtcagagtagaaagagcctaggccataggcaacagcagatctgagttcaaagacccagagtgattggtgcttggagctctgtgactagaaatatcacagaagcaggtgacagatctgagcctcagtttcctcatctgcaaaatagggagaataataaatagatcccatctcacagagctattatgagaactaggaagataaaagtaaaaaagtccaaggcagagggggacacaggctccacaatgacaaggattttggttcaaggtcaggtagctggggttccctggaacagtgacccacacccacaacaaaagttccactccaaatctggactggctccataccactagggaatcactggagggatcactccaaaagacaacttaacatgcaagctggtgtttgatactcttcagaaattaactttccggactgcaattccccaaatgactcctaaccctccaccactagctgcagattcctcaacacagatctggggccaggctgtgtgataagtactttgacactgtatctcaattacccttcttaaccttagaggttggtgttacgacaacccctttttccaggcaaggaggctgaagcaccctcggtgctgggaagaagcaagaccagaggccacccggggaccacccacctcctccagagcccaccactccttcctcctctccctggggtgaggaacaattgcaaggggagaaaagtccatgggcacagctgcggctaggctacagcccccagcctcatgggcagagagagtgggtctggggcaggagtgagaaaggaggggagggagggcacatgagagagaaatgagttgctgtatgcgtgcctggtgcacaggtgataacacagcattcaaatctagaagcacaaactcccacaagaccttccctttctgtaattccccaaaatgcaggggtttgtttatttcaccaagaagtacatattcctcctacagactacaaaaacaatatatacaacttacttatgtaacccaaagaaataatcatcacaggcttgcccaaacagtatcaaaagtggatgtttatcacaatactatttataaaggtgacagaccagaaccatggtcagcatcaaccaagggaatcaaagaacttcagttacaatcagataatattatgcagtcatttaaaaagcaagcctaagtagacatttaacaaagggggaagctctaagagaatgctaagtgtgtttgtgggaacagattacaacagaaccacaactttgtttacaactatgtcaaggctggtggctcgcgcctgtaatcccaacacttttagaagccgaggcgggcagatcacttgaggtcaggagttcaagaccaccctggccaacacggtgaaaccccatcactactaaaaatacaaaaattagccaggcatggtggcgcgtgcctgtaatctcagttactctggggtctgagacaggaaaatcgcttgaacctgggaggcggaggttgcagcgagccaagatcgagccattgcactccagcctgggcgacagagcgagattccatctcaaaaaaaaaactgcatcaaagatgttggtgcacaccatggtcccagctactaagaaggctgaggtgggaggattgcttgagcccaggagttcaaagctgcagcaagctatgatcgcaccactacactccagcctgagtgacagagcaaaaccccatctctaaaaaaagtttaattaaaaaaaaaagtttttttaatgcatcagtgtgtgtgccatttttatgctcaaaggacatgaataaagtcacactttattcacattttagtgtgctggttatccttcggctagggagtaacacattttgttcccacaagctacacaggaggctctccagaccttcctgaaaggcactttcaaacctgcttctggagggtcagaacatcatgcaggacagaggtcaggcactagcaggaggccctggtcccacggcaggtctgtgctatttgaagtcgtaaagcaggtcaatggtggcccagtgtgaggggctgcaggggctgccaggctcacagtcaaggccagggcctggcctaccatacaccaaggcgtttcatcttctccccaagaagatatactgggtgggcaggggtccttgtccctgatggacaaaggaaggcactgagggctcagacagcaaaaataaccgagggtcctgagcgatccggcggaatatttggtcgacaggaaaactcatcaagtcctgccctcaccaggccccaaagccctggcttaagggagggccaggcctggcatttgtcaagatttaacaagttcagtaaatgtgcgcccccaccccacccccatctcccatctctctcccacgccagacccttctccaagccccactccttggccattagctcagtcccaaaggcatccttgcccatcccggctgccgatgatcctgtcaaaacactgtaaataacttatttctacttggcagggcctgcggcaaaaatactgcctgggcaaggaagggagtgagccaaggtctgcctccaagccaggacccacaccctcctgcccagggacccctggtcccccacccacctgagatggcagagacccacagtggaggccaaactcctgcccagtgagacaggggtgtgagcttcacaagacccctcgagtcatctcaggagccagaaaaccagtgagcttcccactccccacagccccacacagcacactaagccctgtccctgacctcaggctacccacgcttctcctacgagggcctgagttttagaaggccttctcacttgccctcccctcgtctcaatcatccatctcatcaccatctggtagatgggcctcagagaggttgtgccactacccaggactgcacagccttggagggatggagctggaactagggaggagtcactggactctcaccaggcaggcagtcttcggagcagaagaggcactggctatgccatcacacctctagaatccaatcccagctccacagctcacatgctaggctgtgacaagcccacctgtgtgagcctcagtcctctcacctggcaagtggggcactaaccctggcactcagtagacgaggcacacacaggagttctcactgctgctgcctgggctgctcatagaagcccagcccagacgccaaacgcactttggaatttttacatgcgcattctagaactctgaagcaatcctactaggtgcttactgcccagacaacagggctggtgacctttaaaaaaaaaaaattggccgggcatggtggctcacacctgtaatcccagcactttgggaggccaaggtgggtggatcacgaggtcaggagattgagaccatcctggctaacatggtgaaaccctgtctctaccaaaaatacaaaaaattagccgggcgtggtggcgggcacctgtagtcccagctacttgggaggctgaggcagaagaatggcgtgaacgtgggaggcagagcttgcagtgagccgaggtcgcgccactgcactccagcctgggcgacagagcgagactccatctcaaaaaataaaaattaaaattttcgtagagatggggtctcactatgtcgcccaggctggtcttgaactccaggcttcaagcaattctcctgccttggcctctcaaagtgttgggattacagacacaggccatcatgcctggctgctggtggccttcctgcagagaatccaggagctctaaatgttcccccaggacacctgatcaaagccccctctcaggcctctgtaccccattcccaccggaaccctgggagccaccccaggcggcttctgtagaagtgctgagtgagccccatgcaccaccgccaagtttctgggacacagctgcagggccgggcaccagcaagccgggatctccttatagggtatactctaaggccattgcataaagctcaaaaagagaaagactcagattgacagtcgagctggaaaacaggcctgtgaaaggagaactagacaccagggcaatcaggtccctgaaagggctgtctctgcctaccatttgtgcagaacatcagagaacttgaggcaaagacgggagccactgtgcttcccaggggagttcttgagctgagggtggatcaaggggaaggagaaagacagagccaagttacaactctggatttacacagcttttggaaaagtcacgatgagtgtgcggggaatccctgggacctcccctgcccataatgaactagcacgggagggggtcatggggctagggtcaggggtcagcactccctgggggtgatgccttcaccccatcatggctagacctggggagatccagaaagaaggaaaacataaatcagcccatgcccccaaatgcaccccagccagagcaaaatctgctctaaccccagaggacaagctgggacctcactcactcacagcaggagactcatccctggtcagccctgctttagccaaaccaaacagacataacttatgctacagacatttctggcttttttactcatgaaaataaatcaaacagaagagatcctttcattttggctcatctacccatcgcatcatttaactacacaacacacctcattcagactcacgcttccctgggccactgaggatgacaatgatggtggtggaggtggcaccagtaaataatcacaaacagctccttctgaggacaaactaggtaaacaggttctgtgctgttccttatctgcatgacctcactcctggaactctatgagactgggtccattattatttccattttacagaagaataaactgaggcttagagggggcaagtaacctgtccagttctaagtccagggcccaagtgtgctggacacagctgactagctgcagcccaacctgtcccccattctccccttcttctttagcaacaaaatcctgaagtcacttctagaccataacccaatgaaacagcctgagatgtgacttaggtccccaaagatttaggtccagagacacccagggcaggactgttagtaacagcaaaccagaaataacctagaacttgagactctggagcagagaaatggttctagatgctgggacatagggatggtgggaagctggtgcagccactctaacagcaatttccaaggtgtttaaatggcacaggcaaatgctcaactgttcccccaaatgcaagtggcaaaactagggacacagaaaagcctaacctgaatgcacatcatatagaaaaaggagcatattttatgtaaaaattgcttcaataattatctctgggttttcatttgtgagcctatcttgacttcccaagatttccacaagtacatattacttaatgagcaaaagaataatctagagttatttttagcaagcacagaccctcgaggcctggccacatcctgtgtagcacaatacctcagtccttaattcactcacccagtagacacagcgcacatcagggccagaccacgtgctcctcagagaccagcaagtcccagcctcaggaggacacaccaacaggcagctcagcttggtgtgcgtgcgtgtgtgcgcgtgcatgtgtgtgtgtgtatgtgtgtgtgtgtgtgtgtgtagggggcagaggcgtctgctgggaaagcagggtaggtgtcactgccaaggtgacatttagcaattctttttttttttttttttgagacggagtcttgctctgtcacaggctagagttcagtggcgcgatctcggctcactgcaagctccgcctcccgcgttcgcgccattctcctgcctcagcctcctgagtagctgggactacaggcacctgccaccacgcccagctaattttttgtatttttagtagagacagggtttcaccgtgttagccaggatggtctcgatctcctgacctcatgatccacccgcctcggcctcccaaagtgctgggattacaggtgtgagccactgcacccacctgacatttagcagttctaaaagcatgaataaaaatatgagagcagggaaggggctgaagagggagatgccaggtccttactcaactgaaatactcagggacgcttcctggtctttggaactgacctgaggcaatgcatctccattcctggctttgactacgatggttctgcgcccagctggacaaggagcacagtccagggccctcaggtcaagatgcctcctcctcagagtctcagccctgcaccaggccaaacgggaaccgactgctgaggaatccagtgtttgcatccgagtttctccatctgcacccagattccctaggatcacactctgagtagcaatgctatggataccttcaccccagaatgccaggacagtcagctactttaagagcagaatcttgcttctggccctttctaaaacccccgttccatcccttcctatttcccctgtgtacttcattccatctcttttctttgcttttacgtaaaatgcttacctggcacgctccactgaggccacggaattcttgacatttgacagccaagcaagggtggcaggtaccagggagatccagtcccaaccctgcgtggtgtggtgaggagggcctggggttctggaagcctgcctgcaagaaggcacccaggcaccctggagcacagggagccccacctgccctggcagagctctgttgtcttgacatgggatgtgggaacttttttttttttttaaaggatttgctcaaattgactcagtgcatcaaaggctggagaaagaatcaccctagaactgagtgccacaggcttcggaagctgcacaagactgcaacacggtgacagcttctatttctaacagcaaacctaaaaagctcaggaaccaaaataaaacggatagaaatgaaaccactcagagtatgacgacagtactcaaagcaactcacgagcatttccccacgctgtcttccaaaatgtgaaaaatgtgatttttttttaatggccacattggagaactgctatgagcagacctcatttatataacccttcccagcacctcatgtatcatcattattaaaaaacactatggggatcatgctttcacataactttgtcttatttgttatctacatagcctaagcaaatagtaaatgatggagaatgaaaataattgtcaatgtttagggggaaaaaaatacctgcatttcaaattttttaaaaaaaccataaaatctatcttttaaaaaaggaaggagtaagctggaatccacaattgttagaaacccaaaagtgatacagaggggaggcaaaaaaaaaaaaaaaatactatattctccacactgaaacaatgtatctttctcaacagcccagtttcatctgtagctgtattttccccactgaaatgccaccattaatcataacaacagatgagtaaaaatcaattaatattccttcagcatctcttaggtgtcttcaatcctgtgcgctgtcatccctttaaagaggaaggaaaagatccacagccaggaaacagactcagaaactcaaacccaggtctctggaccccacagggaagtgaggcacagccaagagcaatctgtgtccattactggcctcaaatgaccacatggaaacactgtgtgcagagccagccccccaagcccgtggcggtcctccttggagatgatggggtctggggagaggtcagagtcaggctcacgtgaacttcagaaagccactgcccaggatatgggtggaccgcaagtctaccatgggctgtcccagctccaaagacgtcagaaccccacagcgattgttattcccaaagccctttacgcttggctccacagcacacggcagagaaaatcgacagaaggaaggatgttcacaggtgtccacccctacctatgccccagtgacctggaaataaaatccatcaagagcaccggggtcagccagctggggtacgctggagagtatgggtggcagagggaaccccgctgtggattgatcatttgacactgtgttcagcataccttttaaaaaaatgttggtaccatgtaaaaatataacctaaataacaagtacatttttaatgctgagatggagaatttagcacctataatccttccagagatgcacaccacgcaaccacgtgagtcccctctggctctgaattccgagagcagctaccaacacaggcctccgctgcctgcactcagcacacctatcggaaagcgccagtgctggcatgggctttccctccctggcggctgctcctcctgcacccccatgcccaggcactccggccagaaacaagggaggagtctggggactgatcctccccctctcacctcccacatctacccaggtaccacaccctgccatctgtctcctgctgccctctgtcactgcaggagcccctggagagcacatcacccctcactaggctgcagccacagcccctctcagaaaaccctgctgtctgctttccagtgcagccctgtctaatcaccctccatgtatcctccccatggctcttcccccatagcctcaggttggagcacccagctttcgcctgcagaagcccctccatgcccccgacacagcaccccatgaacaactcacctggcaccgctactctctccagcctggtctctcactagccccctcaagcctggggctgtagcctttccaagccattggcagccaaaggacccccttccccagctgctgtgtgtggccctggccatgctccttgtctgtaaggccattctaacacctcgcctcctgccagcccctacgcccagtttattccatgtcaggaggtatggcctccatcccctgatggcccactcctccttacatgcccagccttgcgtcctcaccactcccccacagctcagacaggcctgccctgcccctgggcttgggcatccccacggtttccctgccagtgggcatccccacagttccttcgcctccagaggcccagcacccagttctgcctcggccccaggcacatggaccttcccttgggtcttagtgtctctttctcagacttgccttttcttggtggtttgatggtcacccacccaacctccttccctgaaagtctggtgcaggaaggggtaaaaacacatatacaaaggtcaccagcaagccagccagcaccagctctggagaaaacacggacagaaagacgtatgcccaccattcactcattcgcaagccgggagaacttacttacttccttgcctgcttgagaaacagccgccgcaccagagactgggtttcatagtgtctgaattctcaaggaatgtggatggaggacagtgaatctctaactggctgctgcacttctcacacttacagcttgctcattcgcactttaaagtcaaacctcgagtcccctcatgccagcagtcaccttctccccgatcttttacagtaactggggaaaggcagcccagagaacaggccagggcagaggtcaggctgcaaaacatgcttccctaaggacgtccaggctggagggggcccggcagcaggtgggtctttctttcagggtcttcctccaccaaattcaggactattccagaaagaggcagtgagtccctggatggggaaaccgctcctcctgagccttccccacagattggatcggagtggaaggtgcccccaggtgacagcacctagcaaggctgatgcaggccttctgcctggcccacaggagagccccagccccactccccagatcacagacgaccaaggctcctgtgtacgggggaagtaatcatagtgccgtgcttggcacttggtcattttagcaactaggtgttttagaaggaagcacaaggacctaggaactgggttgagctctgtcaggccttgcctctcagttaggatctgttgggtagatgggctcattgccactaaccagactcgtcttccagggagccttcctgatttaccaggctgcgtgagggccctcctctgtgcctgtctggtgtccctgcctaccttggccactgtctgcagacatcacagagagttgaaggggcctggcttgggcctgtgtgagcccccagcacctggggcctatccatagcaagtgtcggggaaactgctgcatgttactgcgtcccatctgcacggcctggctatgaggggccctcagctcagcactcagtgagaccaactcaacactgaaatggtggagtcagggtggcccgtgcgtccagcattcccattaccatactacagagcacggggctgaggaaacaggcacttgccaccatcaccatcatgacaagtagcctctcaagacaggaggtagagagcatctggtcccacgacccttactacactcttcccttgtcctgcagcccaactccctgctctaaacacaaagtaggacatcctcttcttctgagctacctgggtcctggctcccctgcaacttcctttcctgcctgagcagccctgagcagacagtgctgtgtctttcatgatcatcatcacgtggcccaacagaccaggtctgcagacaagtccactgccaagcaagtctcggagcacagttctgggccccagagtcagcccagtccagcccagccccatcagggcctctggacagcctgagagcaaggcctcgtgctgtccctctccgaggaaggatttgcctcaggcctggttctgagaagtaaacagggtaatgttctgaagcagtggacttcaaaccaaacccccacaaaataaatgtttaaaactacatatctatttgcacatttttaagttgatatgaaaaatttctcatcataagtctaaatacttgtagaggatgtaatttccaacatactgtaaatattaacatttaaaaataaaactgttaatgtttctcttttaaatggatccaatggtatctaaataccacggcgattagagattcgccatcatccatttttaaattacataatcaagctcttctttaaccattggaaatttaacagtgttccttttttcctccacaaactctgatctccctcagagatgtttatactatcacagtgtattttatgcttgaaagccttatactgattatcctattatatactatagggccaaaaaatacaaaaatcaatgttttaattttttttaatttcctgtgatttcctgtgatcataaagctctgtcagaagttttctcctggactgaattattataacaattactataagtatacaattgatcaataagacagaaatatattgcaaaattgtataagaaataacctttaaaaataaacttaattaggccaggcgcagtggttcacgcctgtaatcccagcactttgggaggccgaggtgggcagatcacctgaggtcagcagttcaagaccagcctggtcaactggtgaaaccccatctctacttaaaaaaaaaaaaaaaaaaaaattagctgggcatggtggcaggcacctgtaacctcagctacttgggaggctgaggcaggaaaatcgcttgaacctgggaggcggaggttgcagtgggccaagatcatgcctctgcactccagcctgggcgacaagagcgagactccatctcaaaaaaaaaaaaaattaaataagtaaaatttaataaataaatcttattaaaaatacatctatacaatgaatgggaattttttgaaaaattatttcatgaattctcagatgaatattgcctgttgctagaataagacagggtttatcaatttcatctccattttttaatttttacagatgtgagaacagaaaccacttattcaaatttaaaaaatagaatggaaagagatttaccacagcaaattctttggattcctttataattatttgccaagaattacagtaatctagtcatctcttatcaaatattattctttttttttttttttttgagacagtgtcttactttgtcacccaggctgaagtgcagtggcacgatctcagttcactgcagcctcgacctcctgggttcaagtgatcctcccacctcagccccaagcggtcatacaccaccacacccaactaattttttgtatttgtggttgggggggaaccctcagacgaggttttgccatgttgcccaggcagatctcaaactcatgagctcaagcaatccacccacctcagccacccaaaacaaaggtcattcttaatgtgctatcagctgacgacaccatcaggtactctttgaattttgctgcaagcagggaactggaaatacctccctggccccaggatgacaatgactggccactgtacttgaccaccaggagggttttatgccctgaggtctcacactcggtcaggtctgcctgtggatagtgtacagttctcctgcagacagccagcttccagtgtgccaggcccagtgccaattacttcacccaaagtaactcagtcctcacaatggtgccaggggaccagcaccatgattatccccattttacagatgagcagaaagacacagcgtcgttaagcaactggcccaaggtcacacagacaggaacctgaccccaggcggccctgcgcctcacagagtgcacaatcctctgcagaggtgggaggaggaacgaggtgaagaggcacaggggtggcagggaagaagggctcccgagctcctcagcctccagcacaggcacctgaggacactgagatctgcaaaatccactttcttaaatatgctcccacacccacctcgggaaggttacacacaaatgcttccttaaagtaaacccatgatgcctggtacactggagtcctcaataaaaggactgttactgttgccattaaataacaggaagagaaacaactcccatgaccaaccgacctccggtcaccagcgttttgcagtcttgagtcctgacccttggccccaacatccttttttttagatagcagccaaagtccaggtaataagaggaacagaagcatttagtaaatggagaacctatgaacatgcagaggagaccgttcagcagaaaaccatgggccacaggcttttgagacagacagacctgcactcaaatcccaactccaccacggccagctgaaatccccaagagaaagcacagcattctgagcctcagtttccccacctcaaaagggtacttaacaccacatcatccctgggtggctgcacagaacgggagacgcccctcagggaccagacacaggaaacacaggaagacggctggcagcaaggggacgtgtgtcctcttcagtcaccagcacctgaacccagaggactgcaaacacccccagctcccagggcccagcagcctggagatcctgcgcacagaagcccagctgattttgaaaagccagccaagtggcttggcttcctgtttttgcagagtctttctcaatgtcttaaaatctaaaagttctccaaatgcagggatgccaggaggaggtgaacagagaggtatcgtggtaggttttatttttagatgctgaagtgtaaagtgtccagtttggcttcgttctggtccccagccaccacttcctcccccaagccaccacctaaatgaacagcatacatgtctagaaagatttcgcaatgcttcttctgccccggacattctgacacaatggctccagtctcctgttcctcccacagaccgagcggattaaagattttagtctaaatcttcccagaatgccacataaatgaaacccgccgacccctgtccatctctcatcctctcctcgagcggtgggggtgacacccactgtgtgacagtttgaggtcgcgtatggacaggatcaggcatgggggaaggctgtcttgccctctcaggcagtgtgtttgctggggagcgcctgaactcacttcctctgaaaatggctcccacagcagttcccccatggaccctcccaagtggctgggcggaaccacagggcaacccggggccttcctgagcacagtgagccccagctgtcagtctcaggcttattgtgggtaaagcagcatctgtaaaggatccgtggatttcccagtgaaccatcatagagggctaaaagggaaatagaagccaccgcatcctagaggtgcaatggttagagaccatctaaccccgtgatgagatgaataaccacacctcctctttccacgcctgtacccctggcaggcactacagatcaacccctgttcccacccactcacagatttaggatcctccaggctgccaaaaccaatcaaacagaaatggtccctgaacacacacccctaagccattcctgaattccagtatcccccacttgatgatggagaaattaaagcccacagaaaaattcaatgcaggttgggcgcggtggctcacacctgtaatcccagcacttttggaaggccgaggtgggtggatcacctgaggtcgggagttcaagatcagcctgaggaacatggtgaaaccccatctctactaaaaacacaaaaaccagctgggtgtggtggcacacgcctctaatcccagctactcaggaggctgaggcacgagaatcacttgaacccaggaggcagaggttgcagtgagctgagatagctccactgcattccagcctccactccagagcgagactccttctcaaaaaaaaaaaaaaaaaaaaaaaaaaaaaaaaaaaggaagagaaaaaagaaaaatctagtgcagaacatgcaattctccagagccaagaagagcctggacaaaaacctagagctgctgagaggcttccagaaactacctccttaccccaaaacaaatctcagtcttccagtgacaagttcaacccacaaactaccaggagggaggtcaggaggatcctttaccagccccacccgtcaaccagccccagtctggtcccaggagcaggggaaacctggggcctgcaatgctgaacctgcaggaatggggacgctgctctcctatgaccgctgagggaaggcctggagctgaagttaacaggggtgggctggaagagctccccagtgggctttttgaaagccccttagatattctagcaggggccagcacctccactgccctgatctagtccccagcttgagttcccctctctgcagctacaggcagatgaggcccgtaagacaaggagatgggatgccagcccagctgcacagaccacagtcaccctccacggggacagcgtggggaacagaggacatggccaggccaccatcaggtttaccaagtacccattaggtgccaggtacagcctttagtgcaaataacacagcctgcccctcacatagagtctgagagtattttgatgtttccttcttccccctccatccatccttccctcttctctccatccatccttctatccttcctcccctccatccatccttccttctccctccatccttccttctccctccatctgtccacctttcccctccctccaagatccttccttccccctccatccattcttccttcttcttccatccatccttctttttctagttaatgagcacctgaaccaagtccacccagggtgaggctacacagagcacaagacaactggacatctagctgggtgcctactgccccctcacccttcccacacccaccctaacctgaccactgccatgcacacccccctcaggactcccaaaccaaccctctccccactgacaaagccacagcaaccctccaaacccgagaagcccctgtcggagtctgcccaggccagggcagaaaccacatcaaatccacaggggagctaaaaacaagctgcacgtgaagaagagagaaagccgtgcccaatgctggaggagagaaggagagacagagaggtgggcaccaagggccccactacccaaagaaccacggggacgcggtctgtactcacctgcacaacctccatccctcgcttcctgtggagaaaaacaaagaaaacaagcgttactccagcaggctggacacgtcctttccgaaggttcccgacagccggctgagggcaggaccatgagagggtttcaggagggagccggcagctgcgcctctcctgctactgtcccagaacagccatgccttccactcccagccactcctcaaaccaccttcccactgagagggctggctctgcagagggacttgctggagtcctctggaggccccacgccagccacctccctccactcctgggccgggcctctgtcagccgagctccagcctgggtcgtcccaaggcccctgccaccaagttcaccaccatcctcaccacctgccgtccctgccgagctcaacccccataggtccccatgtcctccccatcaggtctcgccccaggacctgccacagccagtcatgccccaacccatccactgccacacacgggaggcccacacagtcctgcccgctgccttcccaatgctccactgatgcctgccctggcctcgccaacagcctccaagctgcactcatgtcctctacatcttccccgctcacatgcagtcccacggccaccacgtaacctgactcttgccacccaattttaggagcctcatggcctgggtcggggtttgcccagaacacacaaaggctttctgttgactcctacccttctcttcctgacccatttctttttttttgagacagagtctcactctgttgcctaggctggagtggaatgttacgatctcagctcactacaacctccgcctcccgggttcaagcgattctcctgcctcagcctcccaagtagctgggactacaggcacccaccaccacgcccggctaatttttgtatttttagtagagatggggtttcaccatgttggccaggctggtctcaaactcctgacctcaggtgatccgcctgcctcagcctcccaaagtgctgggattacaggcgcgagccaccacgtccagcctcccccatcccacatttcttactgtgggcccaggaagtgcccacctgtgcagctctggcacacagggctttctcctccctggccctggtgcccacctcccaccccagccttgaggattcggctcagcatagcctctccaggacgcctcctaacctggaagaacttaaggctaccactgtctcggccctttgttctggggtattgattgctacgagccagggacaagcactggtgtagggccaccaggacctgcagggaccgaggcacccaagacagcatactgtgcacattgtgctgggaagaaaggcctccagcagatgctcaaagatggctgcagccaggcaaggtcaggaatgtgtggtttactcacccaagctccttggagcagggactatgccaaactttaaagctatgtgtgcccgtgcccaattatgatgcccacctggcacacagacactcctcaacggctgctggcagatgaaggtgtaaatgtgtaacaatttagctcagctcctgggcccagcactcggagggtacaacaaatgcaacctccacagtctgggcccttgagaggctcaaggtcttagggaggagatgggcacaagccccacaggaacctttgggcacccttgctcccttgtttcatggcacagctgaggcgccgcccaccaattcctacatctgtttgtcagctcattcagtgagggcttcctcaacaccttctgatagcaaggcactgagcggaacctcacaaaggagccactccatgagacaggaagacagaggccaaggagagctgaccaggtcccactgtgggaagcacccagcccaccttccctcaaacccccgacacctcaacagaaacctgggccccgaggaatccagtttgagaaccaccctggttgaggcattcagggaccctcagtgtctcttagcttgtctgcagttcctgtaggaatggtggccaatatccatctgcttccacggtttcatgagggacaggggagatacacaacagcatagccctgggccaccacagcccacagcacagtgacagatagcatcatgaggaacctgtgctacacccaaccacccgctcacaacctgcaccgtttctgagcacctgtggacacctcagcccctgcctcattcccaatcatcctgcccctccccccgcagggacgagaaaactgaaggaagcgtcactgacgggaacctgacccaggacacacagcagaggaccttgaggagccagcccaaactccagcggccctgctccaggacagaaaactcaagtcccaaatcaccgagactgtgaaccgcacaatgggaaaggccggtgacagaggagcgcagacttccactgggctctgggccagggcctcggtttccctctgagtcaaccctgctggcatctgggttatcccagcgtgtgactctcctctctttactgaggtcaattccaatcagtccacattttacatcatcccaggcagctctccctcccttagtcctaaaaaaacagtctctcactgaaaacagatggaacacataaaataagaaagcaacaaaaaagtaatctagagaaaagatcggctgcaatcttaagtggggttgatctcccaggagccacagcagttcctctgtcgctcagagctccaaaaaaaggataagttgcaacagtggcagaaaagagggggccacccacgtatgctacacaccccttgaagctcaccactcaccaataccttctgcagcctcatgagggtgggacagtggttaccccattacctgcagagcaggccgaggcctgggagactcaggaagtgcaggagctggcccggaacagggctctccccacacccacgtgttcaccaccaggtgcaccaccgtgggcaagggtggcaccaagctggaaggcctggtctccagcctccagggcctcagtgcaatggaaggaccaggaggtggcagcggaaaactgcatcccctctggtggtggaatcccacatgcaccaccacagcctctcgggaaaataaaacaacctgtcggggctcatttttcactgggaaactcgtgcagagcaaaggcaccaacaacctcgattccccaagaagcaagttcctaaagtcctgccataaccagaaagttcagaaattgaatgatgaagccaaaggggaagagggagaaggaagggacatgggagacaggaggagggaacacaaatcagagcattggttgtcaagtgactgttcctcctgaaaaccctggctccatgatcccacctcatcaccccacagacaggctcaagtgtgcaatatgtttccggctctgccctgttaattaccaaactgtatgtgatagcaaaacactagcagcaaattaaacttcccccaagaggggacattaacaaaccacacacagtcaaaggaatagtatgcagcagtaaaaaagaacacagaaggcctccatgcacccacgaggaattatctccaagacgttgctgtgtgaaacaggtaagatgcaaaaccctgtgtgctgtagataattatctgtgttaagaacaacatccaggacaagcatgtgtgcttgtgtacacacagagtgaacctgagggcgctacaggaaaacaatcatggcagggcccctggtcaagggcaagggcagctggggtggccgagggacttccttttcactgtgtcccctcatacattgcttcaatgttgtgccatgtgcctataacatgttatcaaaaactggaaaatatattttttaattgtttcttaaatagatgcttgataaaagcacgaagcaatcgatcaatggaggacacaagacagcagagctcaggatgtatcatgaaaagcttccaagtgctgtcccaaagaggagctgaaatgatgcctgcagtggggaccaccaggctgcagcactcgctatgggttctaagcccgtggaaacattccgatacctggaaaacagactgaggtgcgtgtgctgcagtgttaactgtggccacggggctgtggtttttccttcatacttccctgtgttttccagattttctacaatgaacatatacgctaccctcaaaactatagggaaagtaacaataaaagttacattttttttttttgagacagagtctggctctatcgcccaggctggagtacagtggcatgatctcagctcactgcaacctccgcctcctgggttcaagcaattctcctgcttcggcctcccgagtagctgggactacaggcatttgccatgatgccagccaatttttgtatttttagtagagacaaggtttcaccatgttggccaggctggtcttgaactcctgacctcaaaagtgctgggattacaggctgagccactgcacccagcctacaatttaataatttttaagtttcattaaaaacctgcagccgggcatggtggctcacgcctgtaatcccagcactttgggaggccgaggtgggcctcccaaatcacctgaggtcaggagttcgagaccagcctggccaacatggtaaaacctcgtctctataagaatataaaaattagctgggcataacagcaggtgcctgtaatcccagctacttgggaggctgaggcaggagaattgctttaacccaggaggcgggggttgcagtgagccaagatcgtgccactgcactccagcctgggcaacagagcgagatgccgtctcaaaaaaaacacaaaacctgcacctgcgaataattttacaggctctaaactgtcattgtattgataaatattacactaatatataaatacaatatattaatatgaatattaataaaataggaatagctaagtataaacatgcttttccaaaagctggattattaacaaagggatgatccgctttgcacagggaagcctgtccccagaagtccaaggagcacgaacccttcaggaagtgaaaatactcacaaaatgattcgatcctttcagaggaggaggctggcaataaaggaaggcttcaaagaggaggcagcatttgccatctggcagagcaactgaagggtaactacagaccggtgctgagaagagtacttagagaggagtaaggtgagtcctgcgccctccccaaagggtgtctggggctctggaagcttaaagccctctcagggggcgggggctgagacgcaggacagaggataaaggtggggcacgcctcagaggcccaggatgtcaccctgtggcccagcctttacctatgggccagtgggtcccaaatgccagggcagataacctgagaaccaccactggagcgtgtcaaaaatcctcattcgaggcccaccctgaggcctctgatccaggaggcctagggcagggcctgggaaggattcagggttcatcgcactccgggtgttgctcaggagcagctgggtatggggacagctgcttgtccacaagagcgactccatgtgcttctctgtgaccagtggaagcaggatctgatttgctaggggaggacatagcaggggtggggtggggggcagcccttgcaggtcttgggaaaagggtaaaggaaacctaagaaccagaaatagttgtgacgctcacagtctggaaggagcagactgaggccctgcgccaggcccaggagacgagagaacactgcaagaaggcagcagcagtccacttttcaaccgtggtggtgccaggaagtggttagaagcccaggactgagcttcgcagcattcagaggcttagatgaacacaattcgggggcgtaggcaggagcggaagaggtgggtgagcccctgagagcagaacatggaaccagacccccctgtaccttgtgcctctgttttcttatctgtaaaatgggagaatcctagaactcatcccacacgggctttaagggaaacagagtccaggcctggcacagtacctggctcatgccagggatgggggtcttgtgacctgcactctgccctgccaccctgccttcctacccttccagaactgcctcctccagtccacatgactgggggcggcacgcccactccaggggtgggcacatgacctgtcacctcacttagcagcagcatgggagcaggacccaagccaagccggtcctggtcctttaccggacgggtcctgggggactgtctgcagtacaaatggcactgcctggaaatgctggaggacaccattgcttctatgtggcgagaatccagatgagccagaggccaaccaggagaaagggccaagagggctccaggagggcaaattccccggccagacccggccgcagtggggctcgtcctctctagaccttcagctgcagatttctgctcaagccagctaaagctttctgtcgctggccgctgagcagcagggaccctgtgagtgacagtggttaccacttctgaagatgatgaaaattactctggatgacccagcactgagggagaggggatgataagggaaaacaataaagatgatcagggcagaagtagaaaagagtgatgaggagcagagacacgtccacggcatccacgccaccaccaagccactgcagcacagtaccaggtgtggcgtcaggaggttaacacaagacactctgggatgacagaccccatccagcagcaggcctgccacacagcacagcagggcacaaaaggctcagggaccatgaccagcagcaggcatgggatgtgctgctgagccgctcggggtctcagctttcatatccgttaaaaggatatgacctttcccacccaagaggccctccccagggcagggtggggacctgagcgctgcagcaagtgaagtacatgaaatggtgaagaagcaagggaggaaggttctacggagaacaactcggggaagtgggaagccaggcacatcctcatccaagcaacgtgtggcacagttcagtaactactgatttcaggcaccccaaataacaagaccctttggcacctccaggtaccaggcactggggaaaaagccccaagttatggtcccctttccctgcctgcagagggcagggcccacaccgtaccccacagaagcccaggatgtctccccaggacttggggctcctaaacagatgactaagccccgtcacccatgtgtgttgatggccacactgttcccttcctcaaatgccatccccacatcaccacctgaccccccaggtcagctcctctggagaaacctgccttggctcccaccctcctcaggccccactgccccaagctgcccacacccagcactgggcagagagaaaggctgctggactccattgcactgaccccaccaggctaatgctcggtggtgaacatcaatggtggccatcaaagccggcaatttccctcctggacactcagtgccactgtgttgtccctgcccccagtcaggcatggccacaggacttgccttgggcaatgagatgtgaacagaggtgaccatgtcccctcctggaaaaagcattccactgccagcaccgaggcctccctgacctcagaaacaaggaagcacatgaggctgccacccaccagcagagccagccagacccgccacctggaaacaacgcgggctgagtggcgacgaagccaggctgggaaccagaaagaaacaactgatgaagaggacctccagctagcgctggttcccaactatgggcaactgtgtgtcccccacaaggagatttagcaacacctgaagagctttttgattgtcacaccgaggaaagtgctactagaatccagtgaggaaagggcccctgtaatgcagaggacagccccctaaaacaaagaattatccagcacaaaaggtccacagtgctgaacttaagaagtgggatacacactgagccactgcagggcagaccacagcccccgagagtctctggatccagagtgcatgctgaatgagttgtgagtaaacctatttccgccagcctttcgacactacttgtcactgcagcctaacctggcctatcctgactaacaagcactctttcagggacacagcttgtgccctgtgtccacagccccaaattcttagcaaaacacctgccacatgggcatttggaggtgcagctcagaagacacgagggggaggcagcagcagcctctcaaaccctcccaggagggaccccaatctccaaatgccaaggcttgacctaagtctgcctttgcacaaactgatccccctgccaggcacccttcctcagctggcaaactcctgcccacccaccaagagcagctcaagtgccttcctcatcaagaggcaggaataatggcttccactgaagcctgctccatgctcagcatcagaccatgagcccctcgaggccaaagatggctctttatttcagcatccctgtgccccctgcagaccctgggcctggcaggctctctgcaaacactccccgagtgctgccgggttcctgggccaggctccagccccgtgtcacccctgcccgcctgccctgcggcatcttggtttacttgctgattgtttggtaatttggattttcctcctattaacagtgccagaaactgaaatggcccgatataaagacaacatacgaacagaattttaaagccagtacaaacatttgaattgtctggacagctctagggaagaaccagataaactggaagctgccatgtgtcttttttattgagtgggggcatctttcctttgactggggagtcaccaaccaccttacctgaagaccctccccccgaccgggtgccccacccaggggaggcaggccggccccaaagtccgggcgcccctcagtgcaggcacagcagcctgagtcagtacactccctcagacccagaacagcttccaggggtgcctggaagcagcttttcccagtgaacaggcacaagagagagacagagtgggtgacccacctttggcacctcccggagaggtcatcagagctgcaggggctgaaagcagcacaggaactgaggtgcctttgagactcccctcctcagttcaattttcaggaaggaggaagtgaggcgagggcaggagatcacgcaaggcagtgttctgccacatccaaggggccaccacttcagatcaggaatcatcctgacttcttgctgatcacaaacgttaaatctattcccttaatggctctcgacatccccgctttttagtgtggaaattctcgacttgaaattgtttttgagtcttttactatccccttgcaggtgcggtaatttttctttcccctaattagggatgggacctaaattgtgggaagcaggggagttggctgctgggagagggaggtagtggggggtgctggcaggcttggttctagcacctcctcccctccccgctacccccactccccctcctccgtcagccagccagcctcagggctaatgattcagttggttctcttcacagcagcttcttaatcccaagaatgcaaagtcatttagtatcagcctaatgagcaaggtaggctactgcaggaagggaggcagaaattcccgtgacatttccctcccttggactcactgggggagggagaagcctgctcaggaaagcctgaattgttctagcacctatcctcaaggtaccccacactcctaaaatagcagcataagtgtgtgtgtccccagcctgtgtcctggatgctgacactctttgaaaggctgtgttccagaggagaccgaaagacttcacccaaattctgctgccaacactccttacctggcctgagggctgggggcagctcctggtccctggatcccaagcccttaaagtttagttgtctttgccctgctgctgcacctccaaccacaggcagcgagagtttcctggtctgattttggtcaaacatttgctgggcttctctgtcacgcactgggctggcctgggaccagagggggaccccagaccgcaaaccctgccccgagatgctagctgccacagggcagaccagtgggctacatgccatgccctctggcgggtgtgccacaggcccttaaatagcacaaacacctgggggacagcaggaggcacagggaagtttcagtagagctgctgtgtgagccaggccctggaggggagggagagggaggctgccagggcacgctagagaaggcctgctaagcaccaggagaagcaaaggcaaagaccaggtcatgggcactggggtttcctggggccccccagccacaggcatgagtcagccctgaccccatctcagaaaacttaaaccacaaggcaccttactggagtatctccctggcccctcagatattttcgggatggcaggtcaaaggaaagtcccaaggtgtcgggtcacatgggctctggccttgaccttgaccctgacccagtccctcccttctcagtcacagattcacccacaagccctaagaagagcagggtaggagaaaactgtattcacttcccattgctgctgtaacaaatcacaacagtagtggctaaaaacaacacaaatgtattattctcttagggttctgaggtcagaggcaggcttccttttggaggctccagggagaaatcgattcctccgctttctctagttctaaaggctgtccacattccttggcttgtggccacaacaccccaacctctgcttccactgtcacatctcctctggccctcctgcctccttgtaattacaccaggcccacccaggtaatgcaggaacattttctatttcaagatgcctcactccttcacatctgtaagccaagagcagtggcacatgcctataatcccagctacttgggaggctaaggcgagaggatcacttgaggccgtgagtttgatgctgcagtgcgttatgatcagacctgtgaatagccactgcactccagcctgggtgacacagtgagacccccatctctgaaaaataaaaatttaaaaatcccatctgtagtcatgtcatacccttttaccatgtaaggcagcacactcacaggctctgaggattagaacctgctgtctttggtggggagtggcaggggccttactttgcccaccacaaccccaaggctcccacagctctgccatcccaggattctcagacatcgcctggaagcattcatgtgtcaggcaggaatgaatgaggacctgtcaggagtttgtaggggccttcaacagtcaatgaggagttgatggggaggagcacagcacagctttgcacggtacccgcagattcccaaggggcactgggtacagcccagcatggccgcaggggtccctgatgggaatggcgggaaagaagcccagggaagggatgtgggggaactgggtgctggagaccaaaggctccaggcctggaagccttggctgcaaaccggggagctgggtgataattactgacacttgggctcatcctgaggtccatcagaggtgcccaggcacctgaccctaaaacaggcagcgcttcatcggctacccgagagactctccagtttcagagaggattccaggggcctgagcacgacccaaataaatgagaggctaacaccagtaatccccgagctctctcgttccccacccaggcctgctctccctgtcccaggcagaaacagggacagacgaggcagtggcggggcaggatttgtgagtgccaggcacttcgtccccctcacactggatctcagcaaccactgggtgggtacaatggttgcatcttttcttttttggttttgttttgttttttttttttttttgagacagggtctccctctgtcacccaggctagagtgcagtgacacgatttcggctcattgcagccttgacctcctgggttcaagcaattctcccgcgttcaagcaggagctacttggccacccaagtagctgggactacagtcgtgcgccaccatactctgttaatttttgtgtttttaggagagacggggttttgccatggtgaccaggctggtctcgaactcccaacatcaagtgatctgcctgccttggccccccaaagtgctaggattacaggcatgagcctctgcaccaggcctctttttttattttttgtagagacagggtctcactatgttgcccagtaggttgctggtctcaaactcccaggctcaagcaatcctcccgccttggcctcccagagtgctgggattacagatgtgagccaccgcgcctggcctgtcacctcttttcaagtggggaaattcagagcagttcagtatcctgaccaaagactcacagcaggtaagaagcagaaccacaatctaaacccatccaaataccagtaattcccaggctcccttactccccacccaggcccgctctccccaaatctgtcaggaaaccctcctcatcccacagcactgtgtgacttcctggggagaaaggggacctgtgtgatggtggggggcccaccgggtctgttggggatgaggctctgggatttctggaacagggttgttctggacagagctgcctctccacccaaccacctgctgccctaatcctccctcagaaccttgaccccaggaggccaaaaggatggatgccattgccccaggggccccaagacctgaggagcagcccctgagcaggcctgcagtgaagggcccggaaggcacttcctaaggtccagcctctggcatgtcaggatgctgtggggtagacacgccctgggtcaatccagcccagaagccgggggagccagcaccctgttcctcccctctccacacggttgacagtcctgtccaatatcaaaccttccaggcagaaggaacccttcctatgaagtagatttcagctcaaccataggaagaggttgctggcttccataggaaggcagtcaagaggtgatgagcaccccgtgacaagaaggattcaagcagatgccagatgcccacaggcagggaagagaggccaatctgtggggaaggcagtagggctaatgttttaggagccctaccccacctctaaagggttccaccaatgagacagaaatcagctgggtcacaggactgcagctcatgagaatggtatgtcagctgggtctctggaggaggtgagaatgagcctggggcctcagaggaccccagtgccaagagtcagtctcagagccagctctcggcaggcgggcacagcccccatcttcttcctgccggcctccaggcctgtcaggctctgcagctgggagccatggctacagtccccaaacagctggaataatccctcagagccccatgcagggggtcacagctgccaccaagccaaagccaagagccaggaccctgggcattagagagaaatgtcaaaagaaggatgcagaattccagaagagcggaagaactgaggccagcacaggcagggcttcccactccctgagacacacagctctgcggtgcaggccaccaggcggtctccctgctgtccctgcacacacactctgcaccttctgcatctgaaacatggctcatcaccccccagcccctgcccagactcaccccctgggcttccctcacccccaccacttgggcctctgcagcaggtgcacacctcctcacccagcaagtctcgccccatctgttcctagcacaccgggcttcctgccgtgccccacaggtcggttctttcacacttctgaccacctgcccatgctgtccgcccctggaacgcccccatccctgcctaccatgcacaacacggaagcctcttcctcgcaccatcctctcagagggcggtccaagaggaaggacacagaggaacccagggtgttggaaagggtggtcagatcgagacctgaagggccagcacatggtatattctcctgacctgaatgcctcccgtgtgaaggacaatccacagagtccacttcgtgccaaccctaaatgtccagcccgtatccctgactggtgtgctagccaccatcctggagaaaccctacttgtcaggatcagagctcaagatagagaggaatgagccccatttgcagggggtgggcaacgggggcttttcttttctttttttggccagcgttttctggaactaaattcctcctgatgaggaataaaactccagggacaggaggaatgtctggggacctgagggataagactattcctgtgccagtttggttacctgggccaagaaatgtattttttttttctttttgcttaaactcatctgaattggattttctgccacttgcattcacaagagccctggctgcttcaatgtccaaatcgaaacgctacactccatcatttccatcaccaacctgcgcctccagtcttgaaaacggactcatcctgtagccaagccagaggcccccatcatcctcccctgctcttcctcctcatcccttcctccgcaatcaccatggaaaggtttccctggggcttgcaggcagccaagggccagtggtccctctcccagggagatggctcaccgtgtgctggaaggaaaggcaggaagaggaaggcagatggcctctcagctgaagagggaaaaagagaatccccaataacactagctggctgattgcatataattatgaagagaaaaagttctttaaaattagcttcccaaatacagatataatttcaagtgtcccttgtggtgtgattacagcgtcagcccaacaaatgttttcccgtcagtacagaatactcaggcccctgcaggcaaaaaataatgaagccaacaacggcgccagggccagacagctcccacagaagcacttccagctgcccaggaaagcaccaggccaggaagcccagcccagaaccagtcttgctcccctccacagctggcctcgggctcttcccaagaaggcaccaggcacatcattcttcattctctctttttaatcttcagggcctttgatattcagactcaaatgccaagagcaaccagctcatgtcaacaaggatggcttcacttgctgtgtgcctcctacgccgagtgctgggctctacacctcggttttccggcctggaaaatagcacggtggctgggcatgtaactcaggacactgccagagggtggaatgaatgaggctggcacatagtggcatccagtcagtgtcaccagctcctccccgcctcccatttaacctcagtcttcaggtgtggcacctgaagctcagacaggctccaggagccatgcagctagtcatagaagagcaaggaggcaaacctagctctgccaggtccagactccatgctcttgtcacactgggtccttgctgggcgtgagggatgacgggaggcgccactcctgggcagcactggcaggccgggtgcactcggacctcagctgctgctcggccctcttcaggaccctgggtttgagccttgattttaaagcaccacaggctctggcacggtgtccaaccccatgactcccctgtcccccaggctctccacctcattccccactttttacacagaagagagcccaagaacccttttataagcaaggcccagaactgagagggacttatctgaggtcacagagaagtcaaggggagattaacacactgtcaccaggcacccacgctaagcccagcatggggagggtgggcacactggcattcgcagcctccaccagcacccatggaaaggctaccacagccccacgccaaagatgcaaaatcgaggctcagggtcccctacaaggaccagagtgccaggattttccatccaggcctcctgacccccagacctgaggtccttacggcaccacggaagcctggagcaggaagccaggcgctctgactcccaggtcacatcaagcacatgtcagcacatggctacacgggccttgacatgggtgagggaggacagcatgccagcccccaaagcaggcctgacccactgcctggaaacagagctcgccaggtggcagtgcagccaggctgggaccagaagggaatgatgaagaaccctcagccagcactggccctcaacggagcaattttaccccccacccagaggacatctggaagtacctgcagacattcttggaagacgagagtagtactggcatccagtaggtggaggccagggatgccgttgggcacagctgtggggaacccagccaaagctgggcctaatgtggtcctggctgatgtccactgggtcagccaagcttccaccccacgacagccagggcaccctctgcccagccccactgcattcgactcagcctccaggcaccaggagactccagcacggcagggcccaggccagggggctgggctgaagagcgcactcccctgcctcagccgaacccaccagccacagactcacccaccctccagccacggcgcgtgcctccagggtgccccagaccataatagtctttccctagaggaacctctgtcccagatccgactgctgcttcacttggtcttcacaatgacgcccccagctctccatacactcattaccacatgacccctcatgaccaggatggctactcaacaagcaggatgccgttctgtgaccaagtccaggcctgcatgggctcaacacccatctgctgacagcacaacggcaaatacccaacctgtggggcagacacgacccacacctacatggacacggcagaaaggacaaaggacagggtccacagggttctagggcctccaagggcagagatggggtgtgcaggctgccctgtggagcccagctctctgccctgccccagcggccaggccgtttcggccctttgtgttataactgcactagtcctcaagccgcccctggcgtggggtgatgtagccctcctcccagtcagaagtctgagtgctccgacatcatctcctcttcccccgctccccaacctccccttcctcatgaagtcaggccttgacctcagtcctttcttcccccctcagccctgcgctgaggtcaacaggttccctaaaccagtgtttgcaaacatgaatgtgccgtgtgtactggcacctcttgggggtcttgttaaaacacagattctgagtccgtggatacagagggcgtggcgatgctgaggaaccaggagtgctgaggccaccggccccatacagacaacatcctgagtagtcgaggaatagccgaggttgctaatgagtcctcagacctggatggactctgaagagttgatatccaccaccactgcacgatctagaccaccactgcctggacaatcgcagcagcctccccctccaatcccacaagcccctggcttccacccagcagccaacctcacacaactgctatggctcccccagccttcagggcaaagcccaagcgtgtacaatgatggcttataggatcctgtgcaacccggcctcaaagggatcctcaccccgattgccaagctccaggtggactaaacttctctcagctcctggggcgctccagccaggcccccaccgcctcggctccaccgctcccgggagaagggagggtctgggggcatcccagctcttacacctgggtggtctagcagaggttagttaacctctgtgaggagcctcagtttcctcctccgttctacccgaggatatgcggggcctcctcctcctctctcttccctgcctagagcagttccttggagcaggggattggaggacagacactggcaggtggctgccctgtgggtgacttaagaataagacagaaggaagcaagaagcagagctgaatcaccgtcggtatgggcttttctgaaaactcacctatgcccatggctcagaggaggctgagagggaacgtcctccacaggccagcctaggatgtctcccccagaccagcaagcagtgccagctgcacaccacccatacagctaagtcaccaaggagctgtcagctggacgtggcccctgggagccgggtgaagccatcattttatcagtgcatgccctgtgctgggtgctagacacagactcctcatctcccctcacaccagccctacgatcatctccctggcggaagcttagggacactcaatgacctcccagggccaccaagcttcccagtgaggcagccaggccccaagccggtgagcccaccggctccacgttcttcaccacttgacgagcatgtgtccacacctggcagtcacagcgtggggacgggacccactgcaggcacagggagaggcaggggtgttcctcccacagccagcccactgcttcctagaggctctcagcccaggcttccaggggctccccacagccacccatctgcaccggccctacatgcccagagtccgtgttgaaggactcctggctccacagcgtcacgccttggcacaggcttgcccgctttctccactaccttccatccatacctgtccgtgagcgagctccctgcgccctcaaacatacctctcaagggtcaccacctgtggaaagctttcttccatcttcccagatagagaaacttgctctgttcctcgagcagagttcatctaacacttcacctcctgtctctgtctccgcaccaactgggctcccggggtgcaggaggaactcggtgctccagcaccccgcatggtgtctgaaacccagaccacagcaccacctacataccaccaccaccaccacagtaataccatctaccgctgattggggcctacgatgagttatttgtagtaattgtaaataaatctagcaggcagtgaactatggaactttataccattaataattatttcaactgacacaccaaccacagaagttaagaagtgctttttttatcctacagacaaagaaacaggctcagagaagctcgctaacttgctagacaggagcagaagcaagtttgacccagtccctccaattccaaagccagcttctgggccctgtggcaggcagctggagggatgggaagtaatgaagccgctccaggacacagtcacacttatcagcaccacccaaagcttttaaaagggtcacctagagtcacggactaggttttttttttttttttttaataaattcaacttttatcttagattcaggggtacatgtgcaggtttgttacaagtataatgtgtgacactgaggtttggagtatgaatgatctcatcacccaggtactgagcatagtacccaatgggtagtttttcagcccttgcccccctctcccatttccccctctagtagtccccagtgttgactcttcccatctttgtgtccatatatacccaaggtttagttcccatctataagtaagaacatgaaacatttggttttctgttcctgcgttaatttgcttaggataatggcctccagctgcatccatgttgctgcaaaggatggggttgtgttctttttcatggctgagtagtatttcacggactatgttgtggggtaatttgatgagagcctttgccttctacctcctgtaaaataatctcaaactgcatgctggggcctggaaagcgctgagaaacctggccctgcctgcttcctcacggccctgtcctcccaggccttgccccggccacgtcctccaaccacagctcaccaacacaccaagctccggctccctcctgtgcccctggggcctctgcacttgctaaacccgcttcccctgcctgagatgccgcagccccagctttctgcgactgactcctttctgacctgtcagcagcagccacagctctctccttgggaaaggtcttctctgactatgtgaggacagtccccagaccccttcatatcactgtcatcacttcattttccgatcccagataaaatcatccctgtaactcactggttgacatgtctgtaccctccctatagccctcacagactaaagctccaaatgacaagaccttgtccatcttggccatcacttggccacatgcaccacgaggcctggcacggagggaggccaatagatgcctgtaaacagctctgcagaggatgcaggagttgttctaatgaagaaacacacacgaagaacaacaacaggaaatcctgggtctggatgcaatctggaaacaacacaggcacccagcagcacaaggagaaggagagagcgcaggagctagtcctggctgcagattcaccgctggtttccccactgaaaatcccaagggctctcccagttggaatgttcaagaatgtaggggctcgaatgttctagaatgtaggggctccaatgttctaacctcctcttccagctgagaaaaatgaacttcatcatggaggtgggggattgccacaaagataacaccaggccccaatccaggaacaaaacttcccaccaccacacaggacactgacgtcaccgagtcccttggtcagtcacccacagagccttccctctgtaagcaaaagccaagttcctgaagaaccaggactgacaatacctgggtcggtagagctgggcacacagcggacacttcgaaaagctttctgaatgatgacagttgttccttatgaacccgacttctccgcccctccccatacccagcccagcaccagctgggcacctgccaggtactaatttgggaaaggtctatgggctgccggccaacgcgcagacccggatcacacactctgtgtgcagacatgttcccagggcttgaccctccctgtatccaggccctttgcaatgactttgacacctccgccaaggggtaaagtttattttcttaccccttgaatgttagctggccttgggtcttgttttggccaacaaactgtagagacacaaacgggcctccagaggccttggaaacatccactgttagtgtcaggaacaagcccagcagcctgaggaaagccaagaaggaggccaggtcatgcccagcgccttcggttagccaaaggtcaagccccagggcagagaccccttaccagactgcaagctgaccacacacacgcaagggattcctagcaagaccagagctacgcagcaaagcccacagaactgtgggatgaaaaaatgcttattgcttaaagccagtagtttttaggatgggttgttatgcatcaataactgataaaaacttttacctacacgtaacggaatcagaaagggaaggaagacatttatattcacaaagatgcccaatgcagctgtacctacaacagcaagaaaatgggaaaaatcggccaggcacagtgattcatgcctgtaatcccagcattttggaaggccaaggtgggcggatcactttgggtcagaggttagagaacagcctggccaacatggtgaaaccctgtctctactacaagtacaaaaattagccaggcatggtggcaggtgcctgtaatcccaactactcaggaggctgaggcaggagaatcacttgaacctgggaggcagaggttgcagtgagccaagattgccgccaatgcactccagcctgggcgacaagagcaaaactccatctcaaaaaaaagaaaattagccaagtgtgggctgggccaggtggctcatgcatataatcccaccactttgggaggccaaggcaggcagatcacttgaggtcaggagtttgagaccagcctgaccaacatggtgaaaccctgtctctactaaaaatgcaaaaattaatggccgggtgcggtggttcatgcctgtaatcccagcactttgggaggccaagacaggcagatcacgaggtcaggagatcgagaccatcctggctaacacagtgaaaccccgtctctactaaaactacaaaaaaagtagccgggcatggtggcgggcacctgtagtcccagctactcggaaggttgaggcaggagaatggcgtgaacccgggaggcggagcttgtagtgagccgagatcacgctgccgcactccaacctgggcgacagagcgagattccgtctcaaaaaaaaaaaacacacaaaaattagccgggcgtggtggtgggcgcctgtaaccccagctacttgggaggctaaggcacaagaattgcttgtccaacctgacaggtccaccagccccaccagctaaaccagaagcaatgggtcccaaactcatttcccagagcctttgagctgagggccctcaaatagagaccatggtgcagggccgcacagctcagcggcaaagcaggggtctgagcgctggtcccagcttctgccaccttgtgcagcaccgaaaggcccatgaagctacttcagggctgtccacacggccgcaaccaaggcagggcagaacggcttcccttcccgagcttccctccagcactcccatgcagccgcctctgaaaattctggaacaccaagcagaggcacccacagcagttaagcaggcccggggcaaggggctctgagcaggccttgccctcacctgccccactcgtttcagaaaggaaccataagggacccatactctaaccagggcctgtcaccctgcacttctcccaacctccagcccagcccctttgcccggggccctcggaactggggccctgatatatggaacatcctgggtttgtggccaccagccactcaccgttcatttcctctccccttccgggtggaaatagtccagcatgtcctccccgcagttccaccaggcctgctcagctgtggggggccagggtctggcttagtatatcggagcggagtgtcctggacaggagtggccctccccagaccaacactcccctccagctccgacaacccccagccactagttcacagctgctccaggctctcagaattcccaggatccagcaaaaagacaccttctcaaccctccccaagcaggacagggtcaaacagcaacaggctaattgtgtttacataacacgagattgtttagctccagaacacatcagtgtcaaaacaccaaggttctgcacagcgacagcgacagtggggcaggaaagatgtcatccttctccaggaactcaggcagcatttcccaaggcccggaaaaaccccagcccacaaataggacatcagccctccagtatgtccacccacccagctggctgctgggcgcagccaggactctcagaatctgcctgtgtcgggctggccgtgggaataagccagattcaggtttaactgaggcacaaggtggggtccaggaagccgcttcggggctgcccatgcagccacagccacagggaggccccgagcagcctcccttccggagcttcccaccagcactcccacccagctgcctccgagaattctggaaccccaagcagaggtgcccagcacagggtaggccagcctggggctcagacttgtgggggtaggtactctccactcccttcttgggaacaacgtcctagccctggactctgtgtgcgaaccctcaggcccccgtccaagtctttgcaagctgggtccagagctggaagctgagggagagcagcccccagcctcactctggccagccactgaagcccagaaacagggagcacgtccactcccacctcagctgccaaacatccctcccctgcctctgggaaacagtgcccctgcagcatccttttggggatccaccctgcccacactcaggccatgtagaagggaatgaggcgctgcattccccagccccagagactggttcagagacaggtatgtggcccaggatgacaaatcagaggccaacagaaggaatccctgtccctgtggacctggagcatgagggatgggggaccctggagccaacccaaccagctctgaatcccagctctgcccctaccagctgtgtgaccccaggcaagttacttagcccttctatgagaaacaggaatgctaaaaccaccaccctcccagggctgttaatgcggatcaaatgagatcacacacctaaggaacgccacagtgcctggctgagaataaggattgagggtgaggactcaccttgcaccacatgggcctgagaatgaagccaatgtaaaagagaccagggaagcagggagggggccggggggagagaggagggagagagagagagagagagacagagagagagagagacagacagacagacagaccaggccctattggactgtcgcctgagtctacctacacctgaagccagaatgccccaaggatctgactcaggaaccaatacatcccctttattaccgaacccgctcagcactgaggctcctgtcagaacccatccacccctgtggctctaggaatcagccatacaatcgacttactgctcagatcattagctgacgagaccccaatgactcatcacatctgttggttaattgagagtgagaggactggagcacacagcaatggaaacagatttgcagccatgtggcccactccataggtctcactgtccagggggtcccagcctgaagcacatgcagaagcactcacagaactgcccacgtcccagatggctgcgtcagggaaggggcacccactcactcccccatccttcccaggagagcatcccaaatccaaagaattggttcctgtcacattcccagcaaggttaggagagaccacagggcccatcaacaaaaataactcatcctggccgggatggggtccaccaatcatggcccagaacagaacacaccctcgcctcttcacactcctagaggttccctggaggccacaggtgtacttctgggctgcgaagctgtcagcccaaagctctacatgtgtgaccctgcaaggccagccactctgagctgcaaacccttacacgcaaaggcctcttctggctcaaaggttttcaaaagttactcctctaagatcgtgaatctctgtacctctggactctgtggaggtttactctgataccacctgacacaggtgagtaaggggccactttcccccttcttccttccagagatggcctctgccctgcacagaagggaagtttgcatgtgctgaccccctcctatgcatgagcacaaggtcacctcttactgacaaggaaattaaggcccagagaggagctgaaacacacccacagtcatccacctagtaagaagccgaggccgggcacggtggttcacgcctgtaatgccagcactttgggaagccaagccaagtggatcatttgaggtcaggagttcgagaccagcctggccaatgtggcaaaaccccatctctactaaaaatacaaaaaattagctgggcgtggaggcgtgcgcttgtgactccagctactcggaaggctgaggcaggagaatcgcttgaatccaggaggtggaggttgcagtgacctgagatcgcggcactgtgcaaactgatgtttgaaccccacccccagggtgatcggctatgaaaccccgggaaagtcacttaccctctctgagcctcagtctccacatacggactgacagcttcaaagagccacatgttagcgctcagcaccatgtcaggcatgaagctagagctccagagacaggagccactgctgtttctggagctaactgtccttataccacttaacaatgcagggcagggtgactctgcaagcttaagtgcatttctggagggactcccctgcccctaaccctccacactacaggcacctcgtcagctcccccaaaagaacgaggcacattcctcaccaggagggctcctcctgatatgtagacaaaggtcagaagctggggcctggactggcctctccacagctacaggcttccccagagcagcgagaggatggggcacccaaatctccgcaagcacaggccacggcttggctgcgcccaggtcaaggtgataaaaagggtgcttgggagctgactgtgcaggaagcaaaacctttctccaacacgatcccaatgccgcgggacacaccttcctgcagggaggcggcaaaggcctctagtggcaaggccataattccttttcttttcaaggatcccatgacgaatgttaggactttaaaatcttaaagaaaataggctgggctgggcgtggtggctcacacctgtaatcccaactctttgggaggctgaggtggaaggatcacctgaggtccgagaatcacttaaacctgggaggtggaggttgcagtgagccaagatcacaccactgcactccaacctggatgacagagcaagactaacaaaaaagaaaaagaaaataggctggctaggcacagtggctcaagcctataatcccaacacttcgggaggctgagacgggcgatcgatcaagctcaggagttacagccaaacctggccaacacagtgaaaccctgtctctacaacaacggcaaaaaagacagaaacaagtctgggagtggtggctcatgcctgtcatcccagcactttgggaggccgaggtgggcggatcacgaggtcaggagatcgagaccatcctggctaacacggtgaaaccctgtctctactaaaaatacaaaaaattagccgggcatggtggcaggcgcctgtagtcccagctactcgggaggctgaggcagaagaatggcatgaacctgggaggcggagcttgcagtgagccaagatcgcgccactgcactccagcctgggcgacaaagcaagactccatctcaaaaaaaaaaaaaaaaaagaaagaaagaaagaaaaaaagaaaaatagggccgggcatggtggcttacgcctgtaatcccagcactttgggaggctgagacgggcagatcacgagttcaagaccagcctgaccaacacagtgaaaccccatctctactaaaaatacaaaaattagccgggcgtggtggcgcgtgcttgtaatcccagctactcaggaggctgaggcaggagaatcgcttgaacccgggaggcagaggttgcagtgagattgcaccactgcactccagcctgggcaatagagcaagactccgtctccatctcaaaaaaaaaataagaagaagaagaaactcacgagcccaggaccctgagaggtacgtgacccagcacactgtgggcaagagctcccagtggtgagacaactgccctgaagctctccctaagactgaccctggggctccaggagactgtggtgctcactgctgtatcaatccccagaacccaggagtgcccagcatacagcaggcactcagtaagtatgtggcatgtaagtgcataaaggaatgaatggggtgttttttaaaaagaagatgccacggcccaccccagattcattccaggggagggggaggcctgggaacctgcactaggacaagtaccccagggtggagaccggatgtttcctcacctccgcagcccagcccttgactgttggatggaaacagggtgtgaggcagaaatgaaagtgaaactgccacaggagggttctctctgcacccatctaccatgccccgccctgcccaggaagcagcaagctgaccactggaggatcccccagaaaaagatgggtggcagctcccagcagagatgtgtcagaggccccaggccctgccttgggcgggtaggagggcaggtgaggtggcctcttgggtggagggggaatcctatcatttggccctagggcgggtgcactgcacccaccttacagttgggagggcagaggctcaggacaagtctcatgctccaacttcactgccatctccaccatgcactatcctcctgggcccaacaactgcacacaaaggatgctcagaaaagaaccccttgaggcagggcgcggtcgctcacacttgtaatcccagcattttgtgaggccaagttgagcagatcacctgaggtcaggagtttgagactagcctggccaacatggtgaaaccccatcttctccactaaaaatacaaaaatttgctgggtgtgatggcgggtgcctgtaatcccagctactggggaggctgaggtggaggttgcagtgaacaaagatcacaccttgcactccggcctgggtgacaatagcgaaactccatctcaaaaaaaaaaagaacagaactccttgattttcctgacatcgatcgacggcagctggatgctgtgttgaagacaaaggcaacctggcggagtggaaacagcatggtttcaggagtcacccatccctgagggtgaatccaagctgtgctgctcacagcacctggcctctccctgagtctcagggccctcatctagcaaatggagacccctcagccatcctggagggtagttatcccatctgcaatagtgcctgacccccatggtaggttctcaggatcctctgagatctggcatgagccatgaatgtacaagggggcagagaggaagcaacacagccctgccaaagcacagcaggccgcctgaacaaacccagagtcccagtttctggcttgggctccaagagcgcccagagtgaccccaggctaataagaatggttgctgaggagtccatgggtttgcagcgtaaactgctgaggaaaacgccacaagtgtctatctggccagatcggtcccaggaatgtctcttgtgcaaaactagctcctttctatacactccgggcaaaccagcagccagaggcaagaaatctgaaaaggcttcttttgagaaggaatttggcaaaaggtagcaacagcaggtagaactgggctgggctgacgacctggtgcccctgccatgtctccctcctgcatgagggggctccagtgaggcctcaggtgaacggtgccagactggagattcccacagtgagctcagggtacagagacccaggagccagcctgggaacctctggctccagcaaacctcctggaggggacctgcccctgagaagtctgaaacacactgcttcagccttggctaactcggtgcttccccacgcctgacagttttggggtaaggtcttctgaggcacttcatgaaatgacagtgagtagtttcccataaaaatcatcagggtacttcacaaggagctccccagcccccttcccaggagaatcttcatctcacagggaagggagacttcaggatgtgtacttctcccttctccccagtgcccctggagctttttttttttttttttggagacggagtcttgctctgtcaccaggctggactgcagtgacgcaatctcggctcaccacaacctccgcctcctgagttcaagcgattctcccacctcagcctgccgagtagtagctgggattacaggcacccaccaccacgcctggctaatttttgtggggttttttttttttttttttgagacagagtttcactcatgtcacccaggctggagtacagtggcgcgatctcggctcactgcaacatccacctcccgggttcaagcgtttctcctgcctcagcctcccgagcagctgggattacaggtgccagtcaccacacccagctgattttttgtatttttagtagagactgggtttcaccatgttggccaagctggtcttgaactcctgacctcaggtgatccgcccgcctcagcctcccaaagtgctgggattataggcgtgagccaccacgcccatcccctggtgtctcttttgttgggcaagtttggcaaacaagtaacttggaggaagatcgatgactgccaaagagcacacaggtcaggcgcggcttccctcggctcccttgggcacctgagacctaacctgattcttgagaaaggtcagctgacccacccactaccaccccatccaccccaccaccccacagcccagagcggctcatttccagaacacaaaggctggactgaaccagacccacggggagcattttgtcttcctatccctggccccgagggcataactgcagcctccctcggatgggaggaaggtcacactgtcaggaaacaaggctctagaaggacaccccgacacctccttgaaccaccctgtctaaggtggaaaccggcctcagttctgcccagagctgcctgccctccaatccacatggaacccagggcttatggcagaggcttataaggcttatggtagaggccagggtgtgtggcctctacaaagtggacaccgtccaccctgtgggtcctttagctcctggagagagctctaggcccctcttgctgaatgtcgcctccttagagaggccttctctgaccacagagtgctaaagtggctgcagccactgcgccatagttctctcctgtttgcaggtttcctggctctagtcacaccttgcagcatttccagtgcatctgagagctggtttgccttcacctcctgcaggtgtacatgccggcaaggaccagcacccagcacaggcctggccagggcagatgctcaggacttgcccacaagcccctccggaacctgggacttaccacctaactctctccccatctcccccacccctggggtttccttcctggcccagagcattccagagtcacaagtggctttggctgagccatagggacatgaaaaaggcttccaaaaaccaccaggcagttattgatccactaacatactttttttttttgagacagagtccagctctgtcacccaggctggagtgcaatggtgcaatcttggctcactgcaatctccacctcccgagctcaagcaattctcctgcctcagcgtcccaagtagctgggataacaagcacctgccaccatgccctgctaatttttgtatttttagtagagataggtattcaccatgttgcccaggctggtcttgaactcctgacctcaagcaatctgcccgcctcagcctcccaaagtgctgggattacaggtgtaagccatcacacccagccactaacagattcttttttgagctcctatgtgcactggtataggcactggggtttcagcagtaaataaagctgccaaaatctctaccttcatagaaccaactacttaaaaacaagacagacttaaaataagcaggacaatgagcaagtcagagaggaagaacaggcccagtggtgggggcctaagtatcagtgaagattctgacggcgagagaggtttggaacgaagacatctccctgaagctgtctgggagggcctttggcctgtgggtcccgattcaccctctggggcagctgagtctgcaggtggcctctgccacaggtgtgccctggaacatcatgagcaattaacagggtggggcacccagcactcaagggcctggaggggtggggggatgcggagcggggtctggagtctggagctcccttgtgagagtgattcttgacgctccacggctccacgggatctctgacacgaatctcagatccaccccaccgaaccctaaaaatggctgtgggagcactcccaggggccatccagaggatgggcctacagaaaccagcccatgaggctctgctggggagatgcaggccacaagggcagctgctttctgagcaggctcagagcagcaagacgaagccccagaaagactcaaagggccccacaggtatggcctggccactctaatacacaccgtgggccgcagccgggaggaaaggcctgttcacaaggaggctttggccagtggtgagtggggagcactcggcttggagcgaggcaagttcccctcccacatttccactgtgtgaccatgggccagttctcgggagtcccacaccctctccagagcaaggccacacacacccgggccggctccccaagggccaccagagtgggagaggctgggctgggcccaattcatgcaggatggggaaggtgtttaagacagtgactttgcgagggaaagaaggaggtgcacagctcttgaatgctttgcttcctaaaatgaatgctactttttaaaagggaagtgccatagtattctctcaaatgtagctttccagctgaattcaaaatgagtgggaactgaaaccctatttacatccagctgttcaggaactgtgctcatggggcacttgactttaagtatttactgaatgtcccaaacctgctaaaccatgtgggagaaataaccggtaaaggcaggatggcccagtggttagaaacattgatgcccatcctgccatgcaggtgcacccagctcttccaggtgcctgcagtcagcccccagcaacctaaactcctcaatctcactatctcactaggtgaaatatgaatccagaggaccatctcacccacagatttgtcccggccctgagcgcaggagggtgcgcagcacaggctctcccattcactgtcattgggactgacatattgaaatttctttgtgagcagtttcagaacatgtatgaaaaagctgggcgtagtggctcacacctgtaatcccagcactttgggaggccgaggtgggcagatcaattgaggccaggagttcgaaaccaacctggccaagatggcgaaacccagtctctactaaaaatagaaaaattagccaggtgtggtggtgcatgactgtagttccagctactcgggaggctaagacaggagaatcacttgaacccaggaggcggaggttgcggtgagccaagatcgtgccactgcactccagtctaggcgacagagggagactctgtctcacacatacacacaaaaagtatgaaaaagtaaaatgcctgtgccctctgacccagccctcctcatctagcaatgtacacccaggcaaggggacggggtattgtcatgctgcccataccagcagaaaccaacaccagcggaagaaacatgttccatccttttaagaactggaccacacagctgtttaaaaaaaaagaggtaatgatacaaaactttctccaaatgaagcagcgatgtggagtttctccaagacacacagtcccatgcaatgtgcaagagcacaacagtaatacatatggagagacctacacgtgcacgcgcccctgagtgtgcataaacacctatagagacagactgccccagggaactggaactcagcaatgagaagcgaacagggctgacgtttcattgtatactttgagtcctctgaattttttttaatatgtgcatgtcttaaatattcaaaaagatacagaaaacaataaatgttagctagtaatagtaacaagattaccagtggagacttggcattttcaggaaatccagaacaaactcttctcaatctccaaacttaaaaaaatacaagtagcatcttaacataaatttctcagcttccccatccataaagtaggtggggacagcacctccacctcctggggggctgtaatattcagatgggccatgtgctgaaggagaacagaaccccgctgtgatgctgaaaggccaccaggcaagcctgggccccctccttagctatgcccactgaacagtttcaaatcctcaaacccacatccctgcaagatgatcagttcagccatcgtggccttcagggtgacttgcaaactgccaaaaccaagaacactaaatctacaaaggccaaaggtccctgaatagagaggcatccatgggcagagacccactcactcactccacagggacgacgacagcagcggccgccgccactgacagaattccaggcactatcctggaccctttagcaaattccctcatttgatgctcgcaaccctaagctaaattattaccctcacagatgaggaaagtgaggcacagaggggtagggaatgtgtcgagggtcatggggcacataggcagtcagtcgtggagtcaggcctgaaactgaggcagtcccttcaatagatccatgtgcacacggacgcttcctcctatgtgaagttctgtttgctccccaggaggctggtagaaagtgttcatttgcaaggctgggttatgaatactccctgtgcactgctgcaaagaaaacctaagtcagcacctcttcccacctctgcacccccgaaatggtggcaaatccagacattaaaacaaataaaaaaatacccacccacagaccagcatcacttaatcctggaaaagatcctccttcctccctgcagagaatctcccgaaagaattccagaccagaatgctaagccatccctgtagaaaaggaccttggagatggccctattttaaaggaacaaatgtagggcccaaggggaagggacaggcccggtggcatgctacactctcactggcacgcctcccaagccagtttactgttgacaccaaactcccagacccatgagagcagatgcaggcctgggctacctaccaagggtggtcataaacgtgaacattaatgaactcctcagtcccttctaaggtattgggacaaaagggtccctggtgggataccaaggtctgagactgctccagaaacacgtttcttgcaagccaagtcagcccagctggcctccaagtctctggaggatgagaaactcacagacattcttgtgcttctgtagcctcctggaagccccagcctaacctgggcaaataaacaagggaagccacattctcagcgcaaaggcctcaggagtggactcaagaaagccctctagctggctgtgcaggtcctatagactcccggagcctctgtttcctcatccctccatcccaacgagggatgtcctcatccctcatccctcatccctccatccctcatccctccatccctcatccctccatccctgggctgctggaaggattaaatgagatgaggtccctggaagcacttcattaaaaatcagcaattattacagtaaagacagataaggttcacccaaattttatatggaaagcttcaccaagtcatgtgcctcttccgcccccacctcctgcaacgtaggttcagccacagaaagaatgggacagagaggaggagaggaggaggcacagaaaacatgagctgaggaaactggggccagccagtattccccagtgaggcactgtacagaactacaaaatttaaaattaaattaatatcacccagtatttccaactaacagctttaatttcttcactccccctctgaagccccttctgagcatctagaaaaagccacaaaggccaggaatgcctgtaatcccagcactctgggagggcaaggcaggcggatcacctgaggtcaggagttcgagaccagcctggacaacatggtaaaactccatctccactaaaaatacaaaaattagccaggcgtggtggtgcgcacctgtaatcccagctactcaggaggctgaggcaggagaatagcttgaacctgggaggcggaggttgcagtgagccgagattgcgccactgcactccaggctgggcgacaaagcgagactccacctcaaaaaaaaaaaaaaaaagccacaaagagggggtggtgtgggagacctacaaggttgctcccaggctagggaaggcaggtgggaggggtacaagagaacacaaccagagccgtgtccccagagaaaggggaagaaacaggatggcaacaggaacaaacagtaccactgacaaacaagtggattcaaaggcccatctgctggctagcagagccccatcctatcagagtgcacatctgaaaaggctggcgcctgtccctacctacggcaggtggggcacttcatggcccatgaagtggctctaaccacccactgttgccatcaacgtgcactaccccccaaaccctccccccaagacaaggattacacttgcagaggggctcagctttgcaaggaatgtgtcctgggggctaaatagcagccaccagacccctggaaagataatgagggagactgccttattgtcggagatgcccaatcagaaaggcaatctcaaggtagccaggttggacccattctagaagttaaaggaaaagaccaagagtccggaacctgccccctctcttgatgggtttccccatctgtaagacaaaggggctagatgagatgatggccaacatctcttcctgctctgagatcagatttttacaaggccggacattcagctaaacaacccaccccgggccggaccattcgggtcattctttgcccaaacattaagagcagggccattttttttttttttttttttgagatggagtctcgctctgtcacccaagctagagtgcagtggcaccatctcgacttactgcaacctctgcctcccgggttcaagtgattctcctgcctcagcctcctgagtagctgggactacaggcgcctgccatcatgcccggctaatttttgtatttttagtagagatggggtttcaccatgttagccaggatggtctcgatctcctgacctcgtgacccacccaccttggactcccaaagtgctgggattacagacagaagacacggcacccggcccaaagcagggccattttcaaatacctttagactttttcattagggaattcatagacaattcatcacccgtcgtcagtacagaagccctgcgcccccagattctgaatgtggaaaacatgataatgtcctttgcactgtctctcagccactaaagtctcattggccctcacaccaaacaaaacaacctcacggggctccctggtcactggctcaacagttgcagcattttgcagccagtatagaaatgtggccaccagggggcactgccctgaaagtaataaataagaaacggaaaaactctttggtgttttcttttccttcttaggcttaagtgataaaatatctaaagcttccctagtgaaaacacaaagtgggcttcctcgggttctagaatggccctgatgacttctgccttctttgaagccaatattttggccaaaggaaggcaactagactttgaagacaacaactctttcagagaaagtaatgctctactccccagaacgttgatagcatagcttgctctgaacctcccacccctttaaaggaagaatgtctacaaggtcaagccaatctgcaggtccagcacgaggacctagttgtgagtctcggcgaagaatattttgcgagagcctcctaattaccaagcaaaacaagccaacccaatgacaagcctcaagcttgagttgcagacacaagatgacataaatacagacagcagtacaaagggtgcgaggtattcgctgggatttcccaagtcttacatgactgcagggggagctccggtgcctcacatcagaactggacttcgagaacatgccaaagcagctgctccaaatttctttagtgtcttagaatgcccttcccacaagtgagtgtatccgcggtacaacgttcaagtacccttttgtaatgttccaagggtcctaagactcattttcaaagctctggcttcgagctcctcctgatttcttcatgaattgctggggccactctgcatgccctattgatcatgaagagcctgtcttctagggaaaccggcctgggagaaggcagccaaccccatccccagaccaagggataaagaaccaggcactatcctgtacaagctgtgcccctctggctgcaggaagagcgcctgcggggcttgcacggggcaaaggagcagcaggcccttgggaaaggcatgaggcacacagaggtgctgccaggctcacctgcgcatgccagctcagaccagccacgggcccccaggagcaccaggggttacggaaacccaactgttcaattctccaagatgtgtggggcccccacagggacaaaaatgcaagtagagcccattttcaaaaatcagtctaacaagctgcatcacaaaaggtttccacctggagtttgcaaaaggctttcagagctagattctcttaggcttgcattgagaaaagggcttaactgcttctcagaggcaaagctacagttgtggagcaagggaaggcctacctgacccaagactcagtagttctgtaatttattaagaacgtgatctgttaaacaccggagactccgccaaggagcaccagcatggtgggagcaggggcacacagcccagatggcagaaggccactccacaccacgggcatttacccagcactttctacgcaccagccactccctagctgcgggaccccaagctaggtaccccgctcctctgccgatcggtccccgttctcagacaggtggcccagaatcaccaccctggccaatttgcagggctgctgcgaggctctaatgagacagcaaatcaccacatacatgccaagaattgctactcgcttcaactgggcttaacctcatgatatgcaatgacagcctcaagagccgagcacacgcggggcacatagtaggtggtccacaaacgtgggtgccctttcttcatgaaagggaaggggacgaaggaagaaaaacactccggtccaaaagtaccctcaagcccttaccccacagcgtggatgccccgatttcccaggtccctccgcaaccctcagtagaactcccaccgcgccctgggctgctgggggcctccccagccgggtcacagtgcacctgaacgccccggtccgtgccacctcgcccgcaccggccaccgcttccctggaacgcggccggcggccgccaccgccacctggctgctcggactcagtctccccgcgcgccgcttcttcccgtttggctccgatctcccaaaacaactaatgaggctgcaccgggctcgggccgggggtcaccgggctcgggccgggggtccccgggcgccggcgccgcgtccctccttacctgcacagctcggcgaaggcctggaaattcagcttcttgattttcttctcgctcagccagtagccaactctcttccctttcagaaaggtctgcatcttcctcctcgggcggggagcctgggtccggaggaaatcgcccacaggccgagtctggcggccggcgcgcgccgcgagcgagtgggcacctcctcccggcggcggggacgcggaacggggatcggagctggggcgcgcagtcctgccgcgcggagcggagcggggcggggcgcggcgggcggccgggaggagggagcggcgctcagcgcggaaggccactggctgggccaagctgccaccgcccacgcccccgccgcctgcgggctcgcccgcccgcccaccggctcgcgagcgccgcgccgcccggcctgccggctgaggctggggcacggctgagcctgagtctgagtcggagctggggccagggcccgcaggaggggaagccgggcctccgcagacaccgcccccgccctgcccgccctcccgccgcgcgggcccgagccacacgccctcaggcggcggcagaagcgcggcctccgagcccttcctccctcctcctcccgcccgggtcctcgccctctgatgttcccagccgggccgtaacccctgggcgcgcttggaccccggcggggcgcacgcggccactcggcccggccagagatcctcacccgccgccgccgccgccacttcctcctcggcctggtcctcgcgcgctgcccgccgagaagggcggcggcgagcgcccgcgcactcgccgcccctgcccgccgccgccccgcgctggcccggccgccccgcttgagcccgcggcggcgaggaagcggcggggcggccgccagggggcagcgccgcccgccgcctcttaaaggcgccgcgccggccctcgcggctacccggcgcctgtttgtgtccccgggtgtggggtgcggggcgcggggcttcctgggggcggccgtggcccggcggtcttacttcgggaagggagccgcggtgtgggcgtgtgttccgcctggcctttgggggcgaccgagccgctgagtttcggaaacgtctctgtacccccagcagggttcagcacccccaaggcaatccattgcaactgcgcccggaaggagaccttccaggaattcgccccttccctcgaggaagcggaccctggcccaggatggggccccccgggggggtgggtgaacacccaggggccctcctaggcgtaggacgtgaccaccagttctcactctaggtccccttcactgaggggggaaggggcggggactggaggcgacagcgacaacagcggccgtccccggagaccccttcctcaggggtgcgggtcagcgtcggcgccggggagtcactaaaccccgcctaccctgccctgccctatggggcagccagggagctttcctgcctcaatggtctctgggtttgggaaggagaaatggacttctctccccaggcccaggcaggaaaaatggattcccgtggagggaaggctcagaaaagtttgagaggagacactgaagctggccttggaaatcaaggagattttgatggagcagggaagggggatgagcttgaattgaggctgggagacaagaaaaagccaagttgccagcgggtgaccaagacttcccttgatcacacttgagtcaggctcctccgagacctctttctgaccaggccccgaccttgggctctgtccttggccttcttagtccagttttagccagaatcctgctgtcaagaatatctccacgcttggtatgtgatcaccctggccggcctacattaagaaactccgtctcaaaaaaaaaagaaagacaaggatctctctatgctgcccaggctggagtgcaatggtgcagtcatagctcactgcagcctcgaacacccctgctaaactgatcctcccacctcagcctcccgagcagctgggactacactgtgttgcccaggcaggtctcgaactcctggcctcaagctgtcctcccacctgggcctcccaaagtgctgggattgtagacctgagccaccccgcctggcttccctgccatctttaacgagaatctgattagtttttttctttaacaaggtagagaaaacggatggatggagagtggaaaagacgatgggtgggaaacaggactcctccagggggccagctagggacgggcactgcatgccttaggcaagggtactgcgagtttcataggccatgggagcctagaaggtaagtggtgacaggttccagggtcagctctgtggcttagaatgcctggctcctgggggggacatggaaagctggataaagg

SEQ ID NO: 288 - DNA, 110485 bp, Homo sapiens
  source 1..110485: mol_type = genomic DNA
tcaaggcaataaagggctccattgctggacattgcttggcacctgcagagctggttgctgtagcatcaccaacaataccatgtaagtgaaggcacaaaaatctgaaggaagcatagttaccacatgccagcctgtggagagcaggtgcaaaggccctgtggctttcatcatctgtactcacagcctatcacttctcagagtgatgataaagaaaggatgcagctgggcgcggtggcttatacctgtaatcccagcacttggggaggctgaggtaggaggactggtcgaggccaggagtttgagaccagcctaggcaacatggtgaaaccccatctatacaaaaaatgcaaaaaaattagctgggcgtggtggtgcatgcctgtggtcccagctactcaggaggctaagttgggaggatcacatgagcccaggaggtggaggctgtagtgagccatgatcgtgccaccgcactccagcctgggaaacagaggaagactgttaaaaaaagaaagaaacagagagagagagaaggaggaagaggaggaggcaaaaagaagaaagaaggaagggagggagagagagagagagaaagaagaagaaagaaagagaaaagaaaagaaaaaagaaaagagaagagaaaagaaaagaaaagagggagggaggaggaagggaggaaaggaaacaagaaaggagaaaggagaagaaggaaggacctccacctccaaataaagaattctgagttctgcaaatgaagcccccagcaatccagagctagggagaggactaaaggaaaagtgtacggtagcagatggtgaaaccatcatgatgtgtggcaggggcttcacccccaaaggtctttcctggatgccccagccaagtagccatgaactagttctccagaccctccctgggctgctaccgtgtgccaagtcagaggcttagagcctgggatctgggacaaaaataagacaagctttctgccctccagacactgctccccacacccccccactgccagttaggaggacgacaaaattggttttcaatcaaggcacattctagattcaaatccctgctccccacttaggtcaagttgcttcatttaaacctcagtttcctcatctgtaaaacagactataaatctttgttcagggaattgatctgggtaaaacgggaactccgatgggcgtgttcagccccagtctagcttagagtaaggccccagaagcgatcgctgcaccggagacccccctacttggggacagtgcttcttggttgatgttctagtctctgagctactatttcaaagtttcatgagggttgaaaagactcattttggagagtggtttatattctttacaaattaaaatgttacccagtctgacacccactcccctaacagcccccatgtgggccctctagcttcctaagactccccagcctgcccctcagccaggtctcagggctgggggccagaaggatcacaccacagacagcgctggtctccaaggctttattcaggaaggtttgcatctgtttgacaggcactgtgcaggggtttgtaacagttcagttttctccaaggtcccatggggagaggggtgcagaacaggaagagagcctctcggcaggcggggggggtcctctcctccagaacaaaaggcactgacgaggtgaccaccccagagccaggggctgggttatatacacatggggtggacagatgcagagaaactcaaagctaaatacaactgaaggatgaaagagtccatcttacagggccagggctgcttctgggctctttctaccaagtgggaaaggaagttcaaaacaaaggcaaagctttcaaggagaaacaagagtccagcctttcggtcttagtgttctgtgcaattttaaaacccaacaaaataaatataacttaaaaatgtcttacatgacactaaaggcaagcctgggaaaagcaagcagttgaagaaaccttccgagaatgctaagcagtgctgaatgccaggaactcgtggggccccccgcaggacagggcaagaggaccctgcgcccattcacctgggcacaggtacacagagtttgtcctgcctgctggcacatgcactgccaggacccaaggagtccctgtggtgacgagggctgggcaggcacggtcttccaggctgccagggcaggggttctgggagattccatttcacaatccatctatcccactgagacaaagggaagggccagatggcagggaagcgagtggcaaaatggcttgagagacagagtaggtgtagaagagaactagcacggtaaatacaaaaaaagagaaaaaaaaaacagaaaacaaaaaccctaagtaacagaataaccctaaaatgatgctacttcatactatgttcacatatttaatgtaacccacagccaagtattgccaataagaggccccatgggcctcctttaataagcacatcatttgcatattagcacattgtttgcaaacagctggtgtctgcctaaagtgcttggaacattttgttctcttaaacaggtcccctgtaatttttgttcatatcatgatttgctttagcaaacttctttcacagatggagtaaggataacttttggccagtccatattcatagaatctttacgtctgaattaatgatgcccctgccctgcaaatggctgaagcacagaccaccagggtcccttctagcccaaaagtcactatagctccagaggcccagagttgactttggctccccaacgcccccgtcctgcctgccttccagatcacatgctgccacgaggtctctcgtgctccaccgggcgcgtgtgtgacctttagcaagtcggcccacacaggagctcaccactgttttaaacaagagccaggaagtgtaagttgatttccttttttaaaatctgtacttatacatcctcatgtgtcccaccctccacccccagcaagtgtcactcacacttccagcacaaaaggggaaatgtacatgtcccgtgggcaggttgacagttccccagagaccccggggtggtggggtgggcagtggttcctccagacacacacaccttggtccatagtctccctctgtgtccctagctcctggactctcccagctcctgtacctctgacagcaaaggagtgggtggcaagccccaaggagcatggggcacagagctgggggttttgttcttaagaagtcaggcaaattttacattcccttccatatcagactcactggctttcagttaaaattgggcttaaataggttctccacgaatctccaaatgcagagacttcaggaagaggtgcctggagcacgccctggcatccaccacataccctacaagatacccacactacattggagaagcaggaatctaagccctccaggcagtaaggcttgtttcagaggcaataacaaatgatgccaggaggccaccgcggcacctctggaagccagaagcctgccttcttcctgcctggcgcagacctgagctcctcccctatttctatatctgcaagggactctgggccccatgacaggagcccatgtatgcaggcagggttgaccaactagcaccaggtaggtgagggtcaagaaaaatgtgctcctccctggggccagggcccagagactctatagatcccatcttcccctggtagcacccttggagctcagcatggcagagtgtgccttctgaactcatgggttgcaattccaagtggcacagcttctgctcgcctcctctgggaaggcctagatcagagaacacagccaagctggcttcagccttctcttggctcctgggtctggcctggagccggcaggtttccataccagatgggtggggggccttgcctgagcagccctggagaggccaccagggcatccctgaggctgctaatcggaagacactttgctcacagtcaacatgtggttccccgatggttttgtgccccaactaccagaaagccctgctcccagccagggaccaggaacccggccggccccctgggctctccggtggggaggccccggcagaaataaggctgtgcttggcagcactctaacagcactggccgccagggggcagcaggcctccgcaggtggtaggtccaggctggtgcttcctagggggctcccagaggcagggctcatctggtagggtcccctcagcagccagggaccccctccagctctacacctgacccacctctaagactgggcatttctcttctagtaggtgaccctctctacaaaaagcagtgcaaacaccacctccaagccctgaagttaggaaaatgactagaaactctcatctcctcttctacaaagtgtcttgtagtgcagttcaggagggtcagtcaggtgtaagtgaaggaaaagttaggaacgagaaaggaagcacaggaggaggaaaggaggcccaggcgggggccagggagggcgtgggcagctcaggcgagtggggcatcctgggacatctcggtcaggatgtcgacgaggttattgagccccgagaggtagccatcctcccggttcccctcctgccaggggacgtcatgctgcagggtctggccctcaggcaggggcgtggttttcccaaagtcgatcatccacactttggcctgttccttcttgtcgtggatgaagaggagggagctgccaatgacctgaggagaacatgggggtgaagggtgagctgaagcccgggcctcgccctccccactgcggcccggggcctgggtgaccaggtggggaggctcgctcaggccggacagttgggtgcctgcaattccaatccccattttcagacaggcagcagagccggcccaagaatggccatgcctgggcagagggcatcgggttccagggtcggcgaccacccttctgtgtgggcagcagcaggcaccccttcaccccctgactctggcctgcacactttccactccttccctccctctttctttccttccttcctgccttccttcttttccttcctttcttcccttccttccttccttccagacagggtcttactctgtcgccccagctggagtgcagtggtgcaacctcagcttactgtagccttgatctcctaggctcaagcgatcctcccaccacagcctcccgagtagttgggactacaggcatgcaccacgatgcccggctaactttttgttttttatttttgtagagacagggtttcactatgttacccaggctggtcccaaactcctaagctcaagccattctcctgccttggcctcggaaagtgctgagattacgggcatgaatcacactgcacctgggcaaactttccactctttctagaccacaacccaatctggggcctcgcccttccgcctcctagaacctgactcctcccaaacactctgcagggaaccacagtgaaggggaaggtgcccaggagcgtccaaactatcccggggcgggggtggtgaagaacctgtttcaaatgcacacagcacccccaccccagcagcacaacccctgcagattcagcgtgggcagaccctatagggccttcccagcctggcccagggatagtgggcaccaaagagcctgcccctcctgggtgagctcagagcctctgcatgggagcgaggcgctttcccaaatatggccacacatacccctgcatcacctcagtggggccagaggaaggccgggggcacagaaagggctcaggtgacattccagcttccagcagtgcagggcaggtggggcccctggcgaggctgagcccaaaaaaggggcttcctcttcgcaggtggaaaacaacagacccaagctgatttggcctctttctagaccttaagggagaccccaaaaagtgtagaacaaaatgcttttccaagaaataaaagcagaagtgttgaagaagggtgggaacggctttgagacagagctctgtggccttaagttctcccaggcttggcccctggggtcaggcagccaggcagcacccccatcgtccagagaggcagctggggcaaagggggctctggcaggtggcaggaggatgcttcatcaagtggaaaggagaggccacaggaggagctgagggtctgggggacaaggagagcaaagaacattccgagaaggaccgagctccctgctaggggcacagcaaagcctgagtctcctctctgggtgtgccaccccctcctcgcagccatcctctccaggcgccccgcagggaatgacatgcagagcaaggtagaccatctgcctgaggaggcctggtggtgtagtttgcagaaagatgcaccgccctgctggctgcctcagggctgaccctatgagttcctcctgctggctccgcagccttctctgtgggcataggctgaggctgaggccacctccatgtaagaccccatacaagaggacctccacaagagagtccctacgagaggggctgctttcctgaactacctacacagctgcagggagccgcaggatcccgcttcacacccacccacccatgggattagccagccccaggactgcagctctgtgtgtgtgtgtgtgtgtgtgtgtgtgtgtgtgtgtgtgtgagactgggaaaggcatgcatgtttgtgtatgagtgggtgtgcacacaaaaatgtgtgtggatatatgaatacatgtgtgtgtttgtatacgtatgacttgtgttaatgtgctgtatgaatgtgtgtgcatgcatgtgattgatctgcatgtgtgtgaatgtgtgtgatttgtgaatgtgtgtgcatgtagggtttgagtgtgatctgtgaaggtgtgtgcatgtagggtttatgagtgtgatctgtgaatgtgtgtggtataggattgatgagtgtgggatctgtgaatgtgtgtgtgaatgtgtcatgtggctggggacctggactccccatgtcagggtctcacacccctccagggaacctgccgacacctcccagagcctctctcaggtgtctcagttccccacctgctgcctgctgcccctgccaaccaacgtatgcaaagttgggagattccagccctgcccgagagtggcacctgaagacctgcctgccctcctcagggtctcatctgaagatgtaggtggcggtcggcgggtgcctggctactctagcagctcagagagcttctgccctgagaccacgggtgtgtgggatatgagtcctgccaccactgcccagaatggacaagactctggagctggaaggacaagggaggagaaagggggcaatagccaggggtctcaggcaggacagcccgtgtggtcaccccaggaagcattgagacgcagctcccccgtgcagcgagggtctggtccctgatggcctgcctctggctgcaccaccctgaaaatgcccgatgccccgggcttctggaaggagaaggagaaggcctgttggcacgcgcagcattctgctcaagagggcaaaagcccagtatctacctcgtggcacttgaagaagggagaaacttctagagtggttcgaatggccttcagccggtcccgataggcgatctgggaatagaaagaggaccagatttttaagcgccgcgtggggaagggcagtgtcagaacacccatgcggcctctagtggtccctcccgtgaatgtgctttaccctaaacgccggacatctagaggcagcttcctgcgagcagggctgctgtggcgtctttctcagcataaatgtcagtacctttgacttttgaaaggacagggtaagagagagaaccacaaatatctctcccagtgccctctccatggagccctataaacccatgtcaagctttgctggccttggggggtgccccatcttccccagaagccagctctgtgggtctcacccccgggctgccttgggaagctcgtcatacacaggtacacagagttcctcaatgcctgctggaaaagagtgacagctggccgggccagccgagcagccccctggagtcttcagcaccaggaacaaaccccaggcataggaggcatgttccatggtggccactgcttaggggctgagatcctcccctgcaagggactcaggaattggaggacttgggctacgaaagagtcaggcacattccccctgcctgcagcctcagagcttgccaggagccaagggaagcctccccagctggaaaaggaagatttcccagttccagccggtactgagtctccttggagaaacggctgcctggtccgcccccacttgctctgcagctgctgtggactgttcagaaggtgccattcacaggggctccagggcccgtgtcccagatgtgcctggatctctgactgtcccagggagccgtgcacttggggcacagtggcacaatattccctgactcagctggaagggtcagtgctctggtccctgtgggcagagcatctatccagtctgcgagccgctgcagcagcaacacacaagacagaactttgtcatgaacttgtacaacccacactcctggactcggagacagctcgccagctcttgctggcagggagcagcgtgacctcgggcacacaagatggggacaagcaggtctacccacagcaggtctgctgtgaagatttgctgcacgcttggcatgacacctggcagacggcgggcactgttctctctctcagggcatgggaaatgctctctggagctatggggccgatggctaagggagagtcagtgagtgtccgccaagcttccccgcctacccgccgcacgccagggacaagcacatcgccttcttctttactttccaagcagaagcctggggccaggatggatacaaaccttcctgggtactaacttcagtgcccttgacttttttttttttttttttcccagacagagtttcattcttgttgcccaggctgaagtgcaatggcaaaatctcagctcactgcaacctccgcctcccaggttcaagtgactctcctgtctcagcatcccaagtagctggaattacaggcatgcgccaccatgtccggctaatttttgtgtttttagtaaagatggagtttcaccatgttggccaggctggtctcaaacttctgacctcaggtgatccacctgccccagcttcccaaagtgctgggattacaggcgtgagccactgtgcccggcgtgcctttgacttttgaaagggcagagtgagagagccacaaaagtctctgccagtggcctctctacagagccctacgaactcgggctggggtgtgctgtccctgggggtgccttgtcctccccatgggcacctccagagtagacacagttgtccctccctggctggctggagagaccctctctggaggtgccagactcaccaggatgttatggtttcctttagtgaactctctgaaggcctcggtgacctgctccctcgttttggtcttcttgaagtcccggttcacggtgccgtcttctttctgagaaagagaacaccccacccaggagggggtcagcagggaccctcgggcagaaactgttctcacccacccaacaccacagagcaggcgagccccatctgaacctggggcagggccagtggaggcacccaggtgtccacgtatggcgcatggaggtggcgtgcacagcagaggggagcctgccctgtgcccagacacaggagaacgcagagggtggcgctgacatccccaggcgagtgaacagtggtaggaaaggcccggaggtgtgaagggcatccaggctgaggatggaggagcatgacccggggctggcctgtcctgggtgcaacagcagggccaagagagagggtcggcctcgacttcccactctggggcccgggccctggaaccggtgcccggaggtccctgcccgccagaggcacctcccctcagcacagggaggagagacttgctcccgccctgagctcagcttgacttcctttataatctaccatctcttctttcacgttttctgaaagccaggatccaatacagccctgcccatctctgctccctcgcccaccccactcccatcttcttggccccagcactatctctgttcaggctgtcctgggccctcatgtggggctttgctgacctatgaggaaatctgttctttagggacaaagggaatgctccaccaggagtcccaacagtgggccgtgtctgccctcaggctggagagtacttcagctgtgtcctcactgtggctgccttcgacaggactggcaggacctggggctgagggagcagccctgggtgcaggaggggccgagagccgggggctgtgggcagtgcaccccaggcagagcctcttagctaagggcggggcaggcaggtgatggtgaagacagctggcttctctctgagtgggaagacaggctgtcggctgttctgacggctggacaatagacagagaccaggagcacatcctgctcgagagggagaggtgaagggaaagtggattgtttctaataaagaaaggaaagcgagcgttaaggagaaggcggatgggtacggaatttgcatccagtctcagagctggatgcaaaaaagagggaagggctggtttcaaaagacaaagaagggggcaaatgcctttctcagcccagagctcgcaaagcagctgtcccgggggaaggtaaaaacttccccacatgccaccgtgggcagcgagccattgacagctgcggaagctacgtctaaatgccatctgaaaggaggctcaggggaccctcccatcaggaccatcggctgcccaaccctgactccaggctggacactggagatgatgcagaccatgactggacagagaatgggagacccgacaaccccacagggactgccatctgctcaagagggacagcttctgagaccctgaggggccggcgccccaaagcccggctcttgcaaatttaacagcaagggtgcacacaggggcccagggacagggagatcatccagacagtcaccaatccagacagtgccagttccccaatttattctggggaaagtaaatcaacatttgaacataatcatgtataggaagcttctgtgtgcccatagccagagctaagaactttcctgccagatacacataggtacaaagggatagaagggaaagagccatcattttgtaaaccacaaacacaaagtaaatatattaattaggggaaaattacatttacttataaagtttgtcatgttgtttctttggagcttatgtttctatttctgttccaataaatattttaaaatttccaaaaaaagatcgaagagcaaagcagagagaatgcagtttctcagagaccctggctccaacatcaaaggcggtcagcatgctcctcccttccccgaattgtctgccagtcccagtttgcagccatggcagaatgaaccagctaccccacaggcatcccgcaggtgcctctcgcctggctttcggtgccaggcaccgtctgggctaaatggagagtcctcggcagagggctgacagctgggcagggctagaagccactctgctctgaggcctgagccccctacacagccatcccgcctgaggaataggctgatgtctccaaatgtctggccttggggcgggccacccacattctgagcctgtgcctggagaagcttacagcttccaaagggcgctgagagaagccaagccccctgaggtgggcacgggtggggcccgaggctgccctcactcgccggcctcaccttgattccctcgatcctgaaccccagggtggccgtggagctgatggtctcccgccactgcatgtaccgtggcttggtcacagcccgctgtgctttttcctcctcggtgggggcctcggggtccacctcgatcatcttctggtacatgtccttccgcaggctgggcttcttccgggccttcgtgagctcctcctccaggtaggtcctacgtgggagggaaggcgacatgagggccgaggcctggggcagggctcaccagcagctcctttcctgcctggtggatgaaggtttggggcgtgtgttgcccaacagctgcagtcagctcagtgccctgagtcaaggcacgtctttccgaggggacggcagactctgttccagctggggctggctctaatttttcttttcttttttttttagacaatttttttagtagataagggagtctcgctatgttgccccggctggtctcaaacttctagcctcaagtgatcctcccaccttggcctcccaaagtgctgggattacaggtgtgcaccaccacccagcctggggttggctcttgatccaggagaaaaggtgcagcctcactgaatcggactgccttcactttcactccaagcccatcggctggcctcacaaagcccaaggagctcctcctcgggagacccccacaggaaccagcagaagaaggaagacggaggcagggcagcagggggtgtcgggggtggctggtcctgatcctgctgctacggtggagctaagagaggggactgggggcagggtctactcagggccccactagatccccttggctgcctcggcccttccataaagcgagggcttccaaagccagaacctgtcctggtgggagaagtggtctgtcctcaagtccccatctctgctgctctcaggcagcctgaaggctgagcctgcccataagtgtctctggctctttccaaagaggtgaaatcttctggagcacaaagttcaggtcagaaagtggccttggaaggggtcccagtgtggatggagaaggccgtattgtgggggaaaggcagggggctccctcagcctctgctcatcccagagacatgcctggtgcaccccaccccatcgacaccaggcctcctcataggtgagcccccagtccaaaaagcctgagaaaatgcttccaactcaactgcctcacggccctggcctccacacgagcagctccagctgaactggcggggaccacctagacactggggaaggtaacaggggcagggacagcagagcacttgagcagccgggggctgaatcgctggccctgagctgccgggacacgccacctcccccagcacacagctctgcgcttctaccttctccagagcagaggtggggtgagtcatcccacccccgctcctctgctctccttttagagccccagtctccctacacaacaggctcagaggctgcccacagcccttgaggaggcagaaatcagcagtgtcagttgcaggatggggaagttttctcccctttgccctgtgtgggcgggagctgcccacagaggccccgcccgcctgccctccacctggccctccactcttcctgcatctgtctcccaggccttgttccaacactgcccaccaacttctccaagttgctggtttgggacccagaacagactaaacaaaaactacagcctcttaaaaatgacaggctttagaaaccactgtattaattgaaatttgcacggaaagaaaagggaagaaaaaaacaaatcctttgggtgtgaacttaggcctggctggttaggaccttccaggaggtgatgagggctggagggggaagtcagtagctttgggttgggcccttgcatgcacacacaaccatgtgcgcacatacacacacatgtgctcatgcacacacatgcacataaacgcggactcctgtgcaccactgcacacacacaggtgcacccatgcaggacacgcacagagcacacccctcacatgcagagccaggtcagtggtgacgggggcattgaggcaggggctgcgtgtgcatccatgtgtgtactgtgtagaaaaggggcagccaggctgtgggagggactcctgagggcgctgtaggggaccgcatggtgggtggctgcacttctgcaaagagctctcagcacccccttaaacaggaagcagacctcaatgtgaaatcccttttcacatggcctttctccaaaaagggcccccgtggctcaaagcgggcagtcactcactgcccaggagaggaaagaggctggggggagatgtccacagggggtgccagctggatggtggggcgggatgcccacaggaaggtgaggctcagcccctccccacactcccctgcctgcccgagacaaagtcgaagctccaagccatgcagggaagcagagacctgctcgcccactcacaggacgctgggggaggaggggactcaagatcaggtggaggaagtgctcctttgagacaggccagcccagggagccaacaggtggcaggcgaaagccacccagagctcctaggtgctaggggcgggctctcacctgcactccccaggcccctggtcccaatgtcaggaagacagtgttgactctccaggacaagtcacaaatctcagagcatgccccagagccactgagcacatgtcggcgggagccagagtcccaagaagccccgacgtgcagacgccaccagcaactgcatcacattctccttagtgccacccttctgcccccgccatgcccagcattgtttggtgaccggcccttccctttctctgtgacatgtctcaaactctcttgccctgggactcagcatgtgaggtaaccctgggctccagcctcctcaccctgtcatggaaaggccacattctagaggtgaccatgagcagccagtcttgggagaggccctgcagccaagggttctggatgaacgcatttgggggaaggcacagtccatggcccaaatggaactagcctggcaccccagggaaatgccatggaagctgggtcccacacagcccccttgggaagggctgggctgcagctgggggcctgatttgcagtcaagcaagcctggtgcagaactgcaccaagctgctgcctggctgggtggccctgatgagtcactgaacctcctggtgacagaaccctcctgcttacactggaacatgacccatctcccagaatggcggtgagaacgcaatgggataaataatggaagcatctagcatagcccttggaacaagaagggtccttaggatttgtgtgcaggaaagatcgggctgggtgcaccctgcttctggggagaccttcctcttcccctccacacatactcctctctcatcctcttccctctgcctgccaagatgggttacatgggtaccagccacggtcactctagatctctcttgagagcactagggtgcaatcagagagaagctgcggaagtcaagcggctgggtgggggcagccctggggcaggaagcggggctcctgtccccagcaggagcaggcaggttctggggcagcctggccctgtgcttggctggctgtgtctttgggacagccgacttccagaaatgcccagccagtgttcttcacacaggccgtacttttttggccaggtctgagtggacaccacttggattattctccatgtggtcacctgcgaagtcctgctgctgtctgggttggaaggaagggctgggcctcccctgagaggacacattctggtgcaccagtggatgccatcctgggtcagaaatcagactcgggaaaagcaaaggcctcgggctggctgggggcatgttctttctcctccctgccctatcccaggtccctgtgggctaaagatagtaaggaacttggatggtgggagggaggtggccagggatggctcaagagcaaacagtggggcctgtgcttctccatcccccattctttccctgtgagtgatggcgagagaacacaacagtcagtggcagggtgtgattttaggacagaactcccaggaggagagagaagaaaggaaagaaggaaagaaatgctggctggcttagctctcttctctcctggcctctgtctctgtctctctctctctcacacacacacccctctttctcaatctgctcttatgagaaataatccggttaaaccagtcacagtggacacagccttctgctctgagctctgagtctccgtgcctggcctcccagacagccctgcaaggaagcatgggggggcttggcatctggccgtccagcccgggtgctgcagtgagggccagccccacaacatgagcaccgcacgctggacaccatgggggccgacagccttagggaggttcaccaagcctgcacaggggagaaggagccgtgctgtggatgactcagggtggaagggcagcagtttgagaggtaatgagaaaacccggctgcctaaaactgagccccgagatcacagcagccggcctcaggcatccctgtctgctctctgccctgcctcctcaagccccctcttcctctctcctcttccctggagtcctctccaggcttatcccctgggcaggtgtcagggtgagcctgagcccctgtcaggaacctgggggtgggagccagtcctgcacacaggcccagtgactgctccgggctcacctggggccctgcggtgacctgccatgtgggtttcttgagttccgtcaggggcttcctcctccttttaggcagatacaggtcttttttgggaaaccagcatgttctactagccactctctcttcccactcaccagggctggggaaatggaaagacctcgattcccatctcccctgcagctcacacagcaggaagtcaccatcctgcgacctccctacctggtggctccccgcacccccagcgatcccacctgaaccaagggcagctctctcttccttctctctagggggcctcagaacccagccggtgccctttttctggttccgccagcccctggcttctgctcactggagaaggaaaggggccatcatgggcaaagcccaggtcccggaaccctctgcaaataatgggagatgcctggggatggggaggctctaattggtccaacagcctcctcagcctgcccttgcacctgtgaggcctccgggaagccctgagtgccacgctgtgcacctgccatgtggcttgcactgaggcaggcatgtgggctgcgagaagcctggctcacctgattcccatcttgcagtccatcacacagggcgagtcgaagtcggccagcaggtcgtccatctggttgtagcgctccccgtccttcaccacatccccatggtaggcaggtacgaagggcctcagcacatccaccatcagccggtccaggcagcgctgctctgactcacagtgcttcttcaggatcctgccattggcagctgccttgaaactccctggagagcaagtgtagaaggttcctggtctccggctgcaggtagctggcagaggcaccctccccagcacagggtctgggcctccctggggatggctaagcctggggctgaaggtgtgtctatgtccctgctatggactgagcaccttaaggggagtgggttcaagacctagtccccactcactaactgtaattctgagctggttccccagcttccttgactccagactcctcctcaccagtgttccctgctggaagggtacagagctaggtgagagactgaggtgccacgacccagtcattccttagtgttgctattttcatcctcacctccatcatcagccctgcttctcggcaacgaaggtgtctcctggcctcagtagagaaaccctgattggacaggattcagagccaaggtggggagatacagcaggctgagaagctggggggcctaaggctcagcccacctgggtggcacttcttctgagccagaccaagtaagtattcacacaggctgtccatccatgtgccttgagttgggccagtgtggccaacgaggtaagcgaaatgcgggaccttgtgctggcctgaggaggctggtgaagtcacgaaggccaagtccacaggcagcccctgacatgtctccagatgacagtgcttccagagggtcctacatgtgggctagatggctctggggcctcggctccagatgtcccttctccccggcactgcctggactcagctcctagccaccttcctcccaacaccgcacaccgccctgcagttatggggtggcttggccgcatcttccaccagctgcaggctccctcagggcagaaactacatctccattaatgccgcaacccccaggaccatggcaatttaggcacacagtaggtgctcaatgaaggggttagctttgcctctttgtccagggtgacaaatggcaggtaagctataaagactgatggcttcatctgtcttattgaatacaacgggaagagagacagaaagaaagagactggaagagacagagataagagccagagaccgagggaggggaggatgcatgttttggaggatggggtaacacagactccagagaggtccgttgtctatggcatttacaaggcattggtaaggccgcagcctgcaagtgtggctgtgatttcagactagaaagtcttggagggaacttgctctggagctttgatccccagaatgcagcgtccagggcacctccccagagggctgagcaccatgctgggaaagtctgggagagctgtgtctacctgcgtgtcctgccagctggatccaggggtacttcttcttgaaggacatgacgaagggagaccagtgcaccatgttttttatcttcctccatgatttgctctagaaacaaacaaacaaaaagctctacattagaaagacaaccactaatttctggttaggacaaattcaaagcaaaggccctcattgcctgtggccacaagatgggaagggcccttgacgggctctgaggaccttgccaccaccatcacctatgcggcacatggtgggaggtggctttaccccatttaacaaacagcctgagcaaaatgctcaggggaactcccctgtcccaagagcaacgacccctccaaggaaggctggagaggacacaaccacccagccgcaccacattagttcatattcaattcgtagatgcggaggcaccagaggcacctcttgcctgcgagtggtttgaagagagactttaaagaaattcctcagaacagaacctgcaccgatggcttcaggtcacacaggagggagcaagcccacagctctctcctctgcaccgcgctccgccctctcaggatgtttcttcagtgaaaacagccaggactgggagtgtgcatgtgtgtgtgcgtgtgtgtgcatgtgtgtgtgcatatgtgtgcatgagtgtgtgcgtatgtgtgcatatgtgatatatgtgcatgtgtgcatgtgattgtgtgcatgtgtgcatgagtgtgtgtgcatgtgtgatatgtgcatgagtgtgtgcgtatgtgtgcgtgtgtgtgcatgtgtgatatgtgcatgtatgtgcatatgtgtgcatcagtgtgtgcatgcgtgatatgtgcatgtgtgtgatgtgtgcatgtgtgtgcatgcgtgtgtgatatgcacatatgtgtgcatgagtgtgtgcgtgtgcatgtgtgtgcgtgcatgtgtgtttggggagagcaggccctttgggcagaaaggagaactaaggtatattgagcatcttattttattttctcaatgagcatgcaagtcaattcttttctatttccatctggtggagcctgagcctcagagaggtaaatgacgaagctgggatttaaacattcatttatacaactacttgaaaataaataaaattaataaaattcttttcttccccagcaaaaacaaacaaaacaaaacaaaaaaacaaaaaaaaaacatatttttagaaaaaatatccttaagtgaactttaataagaacaggctgcagagatgaagatcaagtgtccccaaaatacacccgtcctcaggggggcgatgagaacctgaatgagaagcattgtgagttcctgagaaagtggatcctggaccagctaaaccacggagagcagaagccatgtggcttgcagaggagatgagggtggtactgcctgacagggggacacactgaagatgtggttcccactccttgccccgaagcgcccagctgcagccctcaggggtcagcggcggctgctgggtccccaaggtgaagtcaaggtgaaatcggcctcctttgttttttctctctttgctgagactcagccgcttctgtcatcaggttttcaagttaaaatctatttaaggagaggaattcttccttactaaacctggtaattcttatccccatcccagaaactctcaccccaccgccaagaccaattctattcttaagagagggcagcgccccatgaggccatgtgacaaaagggccgaggctttactgacaaggatgtttttcctagatccttctgatggagatcgccaaagaaggctagagccagcggaggcatttcttatctaagcacccagaaggctgcataaacaatcagggcacacaatgcatgagggcaacaatggaaaaacctcattacacaagatgagcccagcagtggctcgtggggacgcccctgctcagggggaagccattacggtgggtccagggggagagtgcacagccggtcaccacccgtgggtcacatccctgcagcagagctcagagaggacaggggctgacaggcttcaggggtggtgtgggaggaggggagcccagagtgtctcaatccagggctcgccctaacccatgccatgtccctatcaggggagaacacacattgcactgtttcacagtccctcctggggcctcagtttcctgtgtccggtgagggacagacagctggtataccaggctccttggatggatggacactctagggccctggaaagtgaccttccctcatcccaacagcaatggcccctccgaggaagactagagagggctactctcccagctgcagcgtgccagtttatattttatgtatacaggaggaggcaaatgagcatgcatggaggaagggtcccaggaccctagaaggcagctcactgtggagaaggagggagcttacggaggctgcacccaccagagacagctgggggccagactcagtggagagaaagagaagactacagctggcagcgggagtgtggggacaaaggcccggggactggaactgggagtggttgggaaccagacctgctatgggcatgggggctgcagacagagggagataggtgagcaggcgaggcctcgggagagcgtggggcgttgaggcaggccaacctgggcccgagtcccggctccccttttcctcctcaatgactgaccttgaacaagttcttagtccttgtttgtaaaaagagcgacacatagattcccattctcccaggagataaagctgtcaggagatgtgggtaccagggtgtctgtgggagggtctttagccctctgtgttcaaggaggggacccaggtgtctctgaagttacttcaagaatggtcagtcctgtgctaggtggagttgctggcctaggttctgaacaataaagacctcggagcctggggcagggtcatgcccatcctgttggggtgcagctctccagagacccacaagacacagtgagcagggagcctgtgacccaggaaggtgaacagatgctgggcgagacagtgtggcttagcctctgcaaggccatttgaagctaagaaacttccagttcttggacctctcccagaggctaaagaccaggggtctagaaaggagggggtgctccagggtgggggtcttctgacagttcaaaggatccacaagcctctcacatcgctgagctctgaccaaaccaggcacctttaccgcttggctcccctctgcccacacctcctccatttcttcaccatgaaaataggtcccacgtggccaaggccctgagagtcccccagtcccaaggctgctctgcctggatgagggccgtggaatattccacttgtgagaatgccatgcacttgcactggagacctcttttctctctgccagcagcagcacacagggtttccccatggtttttaaatagcagcacccaggcagtgcctaatgtcactgccaagcagtaaacagaaaaagccatttccaggtccaggctgggggaaggagggaaggagggctgcagggtgaccccaaccactccagcctagcccctaggagcagagatgaactaaaggatgggaggagattccagagaatcaatgtccttgtgatggtcggggagaccacagcatctgcctcaggaaccaaatccactccaggcacacgccgctttccaggagcggacaggctaacagccctccctccaagcactggctggaggaagccccagtcctcagaaatggactccaggcctcatcccccagataagacaggtaacaaggcaagaaaggaggacaacccagaagaatcccacccagaggggtttatcccgtgcccctccagccctcccttgtgggagatattcaagagtgagctctccacagcagcctctgtctcttctctgtctgaaatcagaccccgtcccaggtctccagcctctcaagcccagctctaggaaatacaaaagtggccttcaaatgccttgaacgtggtgtggcaaagggtacctggtcccctgcccagggcagagctggccacctgctcctgcatcacctcccagtcatcaggggaatcgagacatcccttgtggacacctcccggagtgctcccaaagctccctatgtgtggcaggtccctgctggcctcctggggctgtgagcctctctttggcagacctggggcaggtggccagctctgctgtgacccttacttcctcacacacagatgtggggtcggcctagccagtggatgtgctgggtttcttcctaagctggctgagtagtactgtgcagggggacttgctgctggccggcattgcttttgtcatctctcggggagataggagggcccatttctgcaggcgtgcaccagtaccatggcacggtgtgtacactcatacctgttaccacttatggggctctcgctatgtgacaggcccgggttagagaattatggccttgttcctatgttctagttaggagtgttttctccattttacagatgaaagagtctgaggctcagcaagttacttctccaaagtcatcccattctatgccctgccagtaggtaccatgcacatggggagcctctagccagttcacccacttccgtgcctatcaacgagtgagggcccacctccgagtgccccttccagtctcgagacagcaggatgaggggacaagaggcagaagactgggcaggaaggacaagagcaagattcctccagggcggttcccctggacagccagggtgccagcccagtgaagttttctggctgctccgttagcagaggagcccagggcccctggtgcccctaaagctggccaccgaaaccccagatacatccctccctggggctgctcaggtgccacttccggtgcagctgtcagatgacacaaggtttaagctctcccatgtgtcagatcagagcagccagacacttctagactccggatggagttctgcacttgtgatgttcttgaggacacttcggtggaaaggaaagcaccacaacgcaggggtgcccctgggtaggtaaagggcagtggagtgggctggagacacacggcttttactttgattctgggcagggtggttaaaccaactgaagaccaggcatgaggtctttcaggtaacccccggcctcacaggcttggatgcgaaccagctggggaactccctaggtggctgcactcctggttacaagagcactggtctgagctttgcttagctgctcctctgcaggcagggtgggcagtgcctgctgctgacatttgtcacccctgcctgttgcaacctggaccctgctctgtaagagagtctcgtgctgaactccagaagcgcagggaaagatggagcttcaattcactcagagaaatgtggaaagaaaggatcagaaaacagccggaccagggtgagggaggggtggtggtggtggggaggggagtgattctttgaaactcaagagaggcctggagacctctggtgtggttttgtcccctggcacccgacttgaaagagctaaaatattcagagaatgtggagagagatttgtagtgggagggaaaaaatctgacaacaaaaccccaaccatctttgcattggaggagacaggaagtcagaggcgaagggagcttgaggagccggcagacagcagccacattcccctgcaacagagagaagcctgccccagctcccgattctgctccccacgtcacctgggagtaggaagccctcgccttggggaagctcagggcatgccacattttgtctcccttttcctcttccccttttcccagaagttcctggtctgaagagcagatgggaatctactccctgggggccaaggcctacacagaatgatctcctcctgctcaacacacagagccataaaacagacccagggttctgtggcaggtgggtgtggagccttcctgggcaagcagttactcctccccacctccagcccatccttggagctgccccgagccagtggggctgcctggggagggtctgattctgtgtgtttttctggatcaagtcccaaccctcccgtgatgctaacggttcctgggtgacgccatcctccccgggtccttcccatcaggcatcctcagtcatgctgtacggaaacactgccttcaacaaatcagagggcaaacgggcataacctccaggtctagcctttgtcgttcataaggcaggcaaaaaaggactgctggggacaggggaagaggaggaaggaggaagaggaagaagaggagaagagtgaagagggggaggaggaagaggagggaggagggaggaagaagaggagagagaagggagagcaggaggagggtacgaagaggaaagaggaggaggaagaggacagggaagaggagagaagaaggaagaagaggaggtggggaggaggggaggaggaagaggagggcaggaggaagaagagggaggaaggaggggaaggagagacccaggtttaccctactctaggctgtggggatgtgtgggcctctggccaccccacttacaaaatgctttagctatcatcaggatcatctacataacatgcaaaatgaaaatgaggggtcccttgtccaaaattcagtaagaatgtcatgatggggaaagcagaacttcaccaagctcggggcccttctcatgccctgtgactgctcagccaggaaatgggccctgcctcctggggaggaaatggcccccgttaggagacagcaggtgaccccaggcctgcaggcctctgtggcctgctcacagccaatgaccagaggctcctcaatcctagggcaggggagggctcaaggccaccggcacctgtggctctctttttggggctcagagaagtcccctggaaaggcctggcaggagcggtgaggatgcaaccagacctcagccttctgcatgttgttcagagtctggccttgcttcctgtccctgcagtgctgtctgagccagtcagtggccacttgccctgcccagcccagccttctccgcaggaggccaagccacccagggccagcactgtctgatcctcagctcagcccacatgccccctggggtctgcttcctgtcttctttccagccaattcccgcccctccaaaccaatgttatatttctcagtgcaatttggggtgggtagaagaaagggttgtgacgctgggggcagacacttgtatgtcgtgaggactgcaggtcactggcagccctggtgacccccactcccatccacacatggcaccatctgcagcgcacccgggctcatattctctcaggcctgtggagttctgcaggcaacttcttgctccacacacctgtccccacgccaccttaggcccgcaagggtgtcagcttctgctattagggactttgcagaagaatgactgaggatgctcaggacttagctaactcctgtgtgtattttaaaatgcaacccagaaaccctcttcccaggaagccttccattgcccctcctgggtgcttccaaagagccctgggcacgcttccatcccagttcttctctttaacacaagaaagggaccttggtttaccctggtgggcgctcagagacccccagcaggtttcctgagtgcctggctgggcaggtgccaagcctcacagcatccaggaggagggagatcaaactcagcaggtgtgggaggggctgcacttgcccatctggagcccggtcagaggctgctgaagaaatttcacattctgggcaggtgcgggctccacttcatttccttatcagggccctgacattcctctcccggaagccacagctgtgctgggacaacttcagagaagcaaggaggacttcaggaaggcagctccttccagtcccagtgtaccccaagacagctgcccttcctccagcccccttcttgctgatttggccaggcccatagtggtttcaccaccttgcaaattaagggctgaagcaacatacatactcctctccccctccatcaagattttaaaaggcagcccacggagttggatgttgttctagaaggcaggatgatgacgcagaatgcaattcaagtgtagaggttggaacgaacctttgttctgcagccttccagctgcagcatgggcaaacctcggcgtacactgggcacggcaggtatcaatgcacacaccctgccctccccatgcagtcaccgtgagagcctgagcaggtgacaggcacaaacagctgctctgtagactgtcacagacaggcaaaccttccaggctcactttggttttttgcttctgtgtctattttcttaaattgaaatgattttttcctccaaggcatagcagattggcaagcatccaactaggcactttcagagggcctgatcgtggccagtggtgatcagatgaggctaactgtgtgattaattgcttacaaagcttcccgtcccatgcccatcgcagctccgggaactcatggggcagttccttaggcccccagatgtgtaacttggaaagagtcagagcccaagtgagtcaatatcagtttctggttcaagtcactgacgttgcaaaaagaagaatgatttcccaaagcatcttatttcatgtatgtggaactctgctaggcactgccaaagaaagatattttcaaggtgaataataagattgcttggcaaatttcattttctagagggggtttacattctcttcttagcctctttttcacctgacttgttccctcaatttgctactttttcctccagcacttctctttttatttaaatagtttgatcacttggcttttatctttagataatcgtaaagaaagagtctccctttgttgttgttgttgggtaaaagagatgaggggaaatctctaaaatatcagaaatgggaaatgatccctggaccctctaacactccgaaaacggtattgccagccgaactctgctgcgtgtgtgcaaagagatcacgttacatgtctaacatagtgttagatactaataagctaatagctcaggtaactctcacaacactgatattgttgtctccattttgcaaatgatgaaacatgttgagaggggtttagtaacttgcaaaaggtcacacagcttccaggtttgtgccacttaattccaaggattttgtctcagccaacaggattactgggctcccatcatctctctcggacctggggctatctgcttcccccctatttataaaatagcctcacataaacagcaagggctttgtcagaagagtgacctttcagatgggggaggcctgaacaaaggcctactctcccctccctccaagtctgttcccagaacgtccttactgacacacgctcggggaaggcacatctaacaaagcgtcgaaagtggatgaagaacgcccctgccaggggagaatttgttctgtgtcaaagcctttgttttgctcttgcaaaagtctgagtgagagtcattgagttttccatgtttggaaaaaatccttttttccttccttcttcatttggtctttctaaaaaagcagttagggtttccctagtgatcattatttccttcactggggaaaagcctggtgcttctcctaggctgcagagtggaggcggtggccaactttgttcattgtattccccctggcagggcccagctgggttggcggcagctgggtacaagcccaggcaggtaggggcccctggctcaatagctccctcctgtagccctggttagaaacctggctggggccaaaagcgaaacctgcccctgccaaaaaggagctgggagggaaggaggggaagggctttcaaaaccaagacaccaaggatcggaaaaattaagcccaaggacttggcaggacaggtagctccagctaaaaataaaagtctggatgtaagactaactgcctttccccctttaacaaacaagaaaatccccctaaatgccaaatgcaaaagcactttcagaaaagacccgagtaaggctttatttcatcccccgtctccacccgccgtgtgatgttcccgcaggctggatggcaccgaacatcctccacagcgctgctcaccaggcacgaggttcttctcccccgccctttatggaacccatgagcgtagggtagggattactgagcgctgtcgggttggtgaagtccctccttcagaagcaactgctgggcctggggcaggagaacgaggatgatgggtccttaccagcccctgcagaccgggaccccctgcaggggctacacgaaccagctcagtgaactagctagctaaactagctccaggtgagcgctctgtcccctccacacccaatcaggctgcgagggctgccgggtccctggtttgcagtgcgtagacctggtcgggctgaaggctggagctcccaacctggctgactctttttgagggacgccaccatggtcaatcgacccctagcagcacattctggccaaaaccaggaaaaccctgagtgactgcccagctgtctcctgattagctgccttcttcctgttgcaactagaggcctagtttctaggccaagggcagcacccagactggcacccaggggccctccatcatggccactcttcctcttccaccataagccctaaaccctgccaaaggaggttgcccaaggcccagacggcaaggacagggctccaggagcagcccagggcctcaccaaggctccctgaccacccataagagggagcagggtccctccgggatacagagccacccccagatacggccccacactcactctctggcgtgcccactccaatccgtcagggcaagccatcccatacctgccccacctccaggtctgctgtgcaggtgctctgcccagaaagctctccctcctcccttctgtgtatccacatcctacctctccttccagcagatcccctggaatctgcaagctggccctaccttgtccctgaagtctctcaggccactctagccccacgccactcctggaatcctccctgaagctggagggagatgcaggatgtggatacgcagaagggaggagggagagcttcccagcagggcacctgcacagcagacctgcaggtggggcagggaagggaaaggaagctggggtgcttcgtgattcttgtgtgccataccatgtctcccagtggcaggaaggctcctggggaactggggatctgtcctaaccttctctatgtcccccaggctgcacagccggcaggaatccaatactcccggcatctggctgataagaggaccctgcggacccagcacatgctaagggcccaggcctggaagataaagcacacctacaccaaggctcacactgctttatgttcacctgctcacacctggatttttctagagacttctccaagtaacaagagggggcatatttgtgggaatttcctgtttggtctgcttgggtttctctccaggaccccacggctggcagcctggctggccccaggccccaggggtctttttcactcaagggtttggagggcaacctttcactcaggttagtcactgtttgctcactctcccatccctcaatctgtgatgcccttgctggcaggcaggggacatctcttcgtgggcatccccagtatcctgcaggagccagggacactggagacaccagcaaagaatgctcttccttagcgactctttcaggtctgcactccttccctcatccacactctataggagctggcatcaaaggggcctgcaatcttgctaaaccagagtctttttttggttactcaagaatcgaggtgtccttcacccaaaatggaaatgttcctaaccctccctattgggcagggcccagcaaatgctccatctctggtgagaaggtcattaacttggctcttccctcctcctctctcctggattccatcctcttaagaactaaaaataatgaagggctagaggagagaggcgagagaggaagaaggcacaggaaatgctgtgctgaacagaggcctcgcagagctcacaccaggggcctcgcagagctcacaccaggggcctctccaggcctcaaaggctgctgggcccggaggctaggaggggaccaacaataggaggaaacagggagtggccaaaggggctggggaagagcacgaggcggatgggcagcctttcgaggctgacttcctaatggataaagcccagaggacagaagggctcagcctttcctctgggaaagggcgcctgggctctgcccagctggttaagggccacccctgcaacacgcagcagatcctctcccgccctgcgctcatccactcctccccagagattttatttttactttggtaaatgcaaaacaacaaggccaagttacagagggtggaaatttaccaaaggccttcactgatcggcagacaattggcactgaagttctggaacctccgagcacccgcagagtccatcttgggccgctctctcagaggcgccagccaggggactcagccccatctccacccccaacacaccttcttgggaacagcttcctggtctggggagctagagttgcttaatccttcctttatagcccacagagaggtaaggcagggcaggagcgcagcccatagcatgcgagctgttctagtgccagttcaagaaatagctcgtgtgcttaccagagccagacacagggctgagtatttgctatgtgtgtgtgataagagtctctcaacccatcacagaggtgctgtcactgtcccacttcacagatgggaacactgaggcacagagtcatgagacaacttgcccaaggttctgtacatgtgtagtcaggcaggctggctgcggatccaagctcttcatcactctgctgggctgcctcatttcctgtcatgtggaacaggtaacattatagccagataaactgagatttagatcctgccactcctggctggtggcactaggcaagttaccaaacctctctgagcttcagtttcctcatctataaaatggaaataccatgtatcctaaagtattgttttcagggttaaattaaattctctgtgtgcagtgcctggtacatacacaagagcactcaacagaggcagatacattttgcatacctctcacgtatactgtctggtctgaccccctcaaggtcaagagcctatggatcggatgaactgtatgggagacagctctgtatgagcccagcagatgttagcagtagggtctgaccacctcctcttctatccctaatcccagccttgaatcccacctttccacaaggaaagggcagaaggtgtaggccacagccaggaggaagtggatccccaatgaaaagtcctattccttgacagaaacagagtctttctggaactccaaaatgcccaggagctactttctagtcgggtgtgagagggagtgcacggacgatgaggcagcctggcaggagagccactagaggctctcgtgtttcctgaaaatccccccacccaaacctcccccagggacctgggatctgaaataagtaactctgcctgttccccgggagactgagctgagcaacagggacacaggcagctctgccaggtggccacaagtggaaacagacttcttcatcccatgctggaggatgacatttacaaagccaggaatctaaaacgaagttttctgcagaaagttcaagaatctaaaatgccatcttctctccccaaagctctcccaggcacagccctgctaaaggaaacacacttacttctgtgtgaacagctctttagtaacccctggttctttttcagagattcctgagattgaaaaaacttcaggttatacattttaaaaccttaggatactactggatatagtagaagggacaagatttcctcaacctccaattgctaaaagtttacctctctaggccaagaacattaatggacaaaacactgccttttaattagtttctgggaatgcaaaaaagaccttgtaagagatttggttaagggggtcatcctggtctaaatccaaagccagagttttgggaactcccacttaaggaatttccaacaaggaaacttttgagggaggacttgaataccacatgacggcttataagcagttatcaagctacactggtgcaattcatatttctgacagattatgctgatgtgcctgtggctaaatggcactcagcaagtgagaatgcagactcgcagagagaaccagaaaccccaagctgctttccaaagaagcatctgcagccctgccccagcagtggccaatgcgcagctctgaattctgctatgagtcacccagcttccctctcctgaccagagctgttcagggtagagaccctgtgtctcggttcagcagtcatgcatctgttcacgtgcagacctctggaagcacaggaaacgggttgccaaaaagggacaccagagaacccccaagtatgagcaagactcatcagctctcagggctcagctgtcccccgggtcatcttgacggtatgtgtgacgatatgtgtgattttcataaacagattgactcatcgcccttccccgtgcatctctgtcaaccaggccctgctagtggcagtgggtgcttacttagcactttccccacgtgacaggagcctcccagggccccagaaaggcaggcaccagtctcgcctcctattaccagagcagcaaacagaggcaaaggtgcgctcctaggtttgtgtcccaatcggggcagaccttggggtcttgcccaaactcctaccctggaagcctgcacgccctactgcagccaggttctcccgcccaccgggagcagggacaccctgaaactgtttccttcacttcttgctttaggctacaatgattcaacatttctttcttttcttttttttttatgagacagggtcttgttctgtcacccaggctggagtggagtcagtggcgcaatcacggctcacctacagccttaactttctgggctcaagcaacccagcaatcctcctgcctcagcctccctagtagctgggactatatgcatataccaccatgcctgaataatttttgtattttttggtagagatggggttttgccgtgttgcccaggctggtcttgaagtcctggacttcaggtgaccaaagaagtgatccaccccccacggcctctcaaagtgctgggattacaggcgtgagccaccacgtccaggttaacatgtcttttatattgaggtattttgcagcagcttttgggatcattacagacagcatgggttttcacaaagtgaggtgaggatctcctatgagacaggcaaagaagggctgcaccccaggtccttcctgtcttctccctcagatttacagagaagcaaaaccaagaaacagagcatcgacatccgtagaggctggtccagttttctatctaagagatcttaaagcttggcccccacaaaagtcactctcttgcctgcacagcttacagaaggctcctggttctcttagacttgtttcatctccttcctactgagttagaggaaatgaaacattattgagggaatgcaagcaggttatctgaaaaatgtattctggaatgatagaggctgaagaacgggcttaaatgacttctgggagtccttccagtcagtgagcctgaacacaggcatgagagaggcacttggaggaatggtctgctttgtgcagtcaggatttaggtctcactaagcttggggcctctaggctcaggaggcaggagctgaacgagagcccctgaccatctccaaagagagcaaacctcctttgcaatgtccatctgctgtgtgccgggcagtacacgtatcgtggtgggacgaggggagagccttggggactctgtcccagggagaaggactccagactctcacaatgaccacggcctcttgcaggctcagcccctccaaggtctctggggagagctcacatttaggaactgttaacatcatttctagggaacagaaccagctggctgacttattccccttaactttcaatgctattattagggcacatctgtctcggagtgaagtcaccaaggaaaaacccagctgaagaaaatattttcaggcagtcgtcatttgaatcttcggaaaaggaagcgagccgataaactgccaaagagccccgggattcaaggtggccaaagaggcgcatggaaagtatttgccttgggaatgtgggcagctgagctatttacacagtgtgtggccagcacgacgcaaatggaccagaagctcctagaactgtttcctcttccctttcctttccccctttcccttaacaggatagccagccagcagaggctccctgtaaacctgagtcaggaggaaaggccgtgggtgagtgactagcagccaggtgatatagggcagaggccagcagactcaccttgtttggctacattttttttctaaattagttgctaacatttaaaaatcagattccacacaaaaatccgaattcccaacttctctttgaaatcctgggcctgtaatcccggacagcggcccctgcctggggctgagcagcagccacttaagatgggaccttctcttcccctgtcactgggtcccgctgacacaggtcacctgcccggcccctggtggcatttgagtttgagccgctggatttagagacaaaggggaaagtgctgaggaaagccaaagacctccactgtagtctactcactggccatgtcaacgcgggcaagtcacctactttgctgagctgctgtttctccctctgcaaacagaaatgaaaatgcacagcaaggcctcatccccaaaactgtagggaggactaggtaggaaaacacgggacatgcttgaaaacctgaacacacaccatgcaagtaagatgtggcccttcgggtctgaaagatgaaatagaacaccaagacaaaacgggcctctctgatgagatgagtagcggaggaaacgacagatcacacaaaagctacctcggtggtcaccggcgggggctgagatggaagccaggatttctaaaccacccagccccaccaacctggccctgcctgcggtaccacctccccacccagagaagtggaacatcactgtggtcgtggctgagcagtacctgactctgaccaacctctgcctctaattagttacaacacaatttagaacccgggatggttggcgtttgggacttgcagccacggcccagcccaggtgaggcgaggagacactcacggaagcacctgtggtggggccaggaggaagcctagcatcctggcaatgaaactcaacactcaaaatgctaggagtaaatcacagggcactgtggcctctggggatttcacagtgtagcggccaactgcattttgaggggtgacccaaaagctcctggccatctgcggtcttccccaccagcctgcctaaaaatgaaagaaatgacagacatgaccgcagagggctaccaatgggcttctcagaagataaagagaggtttaaatgataaaggcatcagtcctatatctgccccaaagccctccttaaggccacatgtggagagcgagcagctgtgataccagaagggagcacatggcacggtgggatctggtgcctgtcgtggcagcaatgactcaggccacccaatcagggcaagactcagcaaggtctgccagctcccatcaagccagaggcgctcagagggagaagctgtaagtgcttgctgctctcaggagcaagaggtcatcttgcttcttaccagctccttaccaaggcatcatatgtgacggacatggctccctggtgtccaggggctccaggggctctgggaagatagagcatgtgcagcgtcatgccccagcacactgaccccacagatctaatgggaccatgctgaacatatgaggatcacaaattccatgggagaccctaagatctaccctcagggacagctaaggcgattctggaacagggctgccaaaacagccagtcaatcactaaagttcctaatttaccaccctgacaactctccctacggctagcaccccttgctcttcctatctctccaggatcacaacagcctgtcctgccttgggtgtgccttcctgcaacccactctccactcatcagccttgcagatctttctaaaacatcaatctgatcatgccaatttcatcatgtccctcccctgctttaaaccttctgtggcttccctaaagcctgcaggacaaagaccacagaccacacatggactctcaagggctctcgcctctccccaccaatgcgtcccttcactccctgggctgttgcaaaactgatctggttgtgtttgccaacacacaccacactgcttcatgctcctgaaccttttgtgctggcccctctggctggaagacccttcccctaacctaccgagagaactcttcttcattctttaccatgcgcaattatcacctcctctttgcactttttgcccaatgcactcaaaaaggctaatcgcttctcccctatacctcacacacgcatctgcttctctgctgagaggacattcacgtgatctggtgatgacatgagtgttacccccactagagtgagcattccttgaggactggaaatggccagttcattgctgaacccctaggccctacctggcacactgctttcccagagttgggaatcgataaatataggctaacataaacatgtgggaaccccgccaagacccaagagtctggttgagaaagcggaagagtgctcagaatgcctagcccttactgtggggtctggcttaagggcggggtttctgaagcagaaaggtaagttaagtaagggttgcctcacacccagaggccaagaaccagaggcagcagcatccagactcagtgaggtcccacaaccagggccagcccatcagggagagaggcaaacaagaggagctctggaaccaggacccaggcaggtaacctgggctggctcctggactcctttgtccaatcagaccacccacattttctgacatcagtgctgtccctggatgcactgggcacagctgtgagtgctttctcctgcagatctgggatagggctacaggaattcagaagaggaagctattactttgggagaaaaagggaaaaaattaaaaattaaggaagcttcatggaaaaggtgacatttaagctaagtcttaaaaagatgaggaaaatgtgtgtgtgtgtgtgtgtgtgtgtgtgcgcgcgcgcgtgcgaagtggaggttggtatttcaggattgagaaaagcataagcaaaagcctagaagcaaaaaagcaccaacagcacagccaacagcacagccaacagcacagccaacagcttggctcagctcagcactaagggcctggcacggagcagtttgccccagagggaggcaaaaagagggaaaattgtctgtaaggaatttaaaacaatactgaaactgatgggctttttaccatgaccatgagctggcgattctgatttaaacataatccaacacctcccccaacaaccttttgtctaattctgaacaattgctgcattattcttgacttttaataatatatgtaagcttcaaattcacacagactaattaccttttcataaacattacattctctatggaagttaattcaaataactcatattaatagttgcaaagccagcccctgacacccgtggactcagctacccatgtttcaagagcaagttcacaggattcggtatcagtggcactcactttggggtggctcgtcccccgagtcctgtggtacgatgtgttcctaagcttgaagaccagaccaaaaataaaggctggaagcacagtcattgtaaagacaaagaaatagaacctgggctattccatcctctcattctaccagaccacttgggagtttctatttatgtttctgacttttcaacaatgagatgttaatcaatcctgaagaactgaagaacaggactttgttgcaatgtctggaatttactgtgaaatgggattgttgtgaatttctgccaaattttatgtttaagatttatcctatttgtatatctgctgtttcaaccaaaagaaatttttcaaaattaacaggaataaaaagtgctctgcgaccagctttgagggaagatagaccaacaaatgcggctttgtctattgatcatgatgaatagggaaagatcagtatttacgaagtctgatcaatttacagaagactcaaaaccagaaactatagtttttattcattactgctacagaccactatgaaagtgtaacctttcccctttttcaaaataagcattagcgtcattaaattcattactccctgcccccctttttttattgctggcatcatatacacaaaattcaataatagaaatgtttaactgtctgaaattattttctggccattatcatcatcattattatttatttcttaattattgaaataattttgttactatagaagaggggagtattttaaaaaatctactcctgagctgggcatggtggctcacgcctgtaatcccaacactttgggaggccgaggcgggtggatcacctgaggtcaggagttcgagaccagcctggccaacatggtgaaactccgtctctagtaaaaatacaaaaattagccgggcgtggtggcgggcgcctgggctgaggctggagaatcgcttgaacccaggaggcggaggttgcagtgagcggagatcgcgccattgaattctagcctgggcaacaagagcgaaactctgtctcaaaaaaaaaaaaaaatgtactcctggtgtaaaatatgctagatgcaccactgattcagcttcccaacaagaaggtcctaagagaacagaaggtgagtcttctggaataacaaagccaacatcaccacaggcctcaactgccaggctaatgaacttggactactgtctctaggtaaataacagagaaaattaccaagaactatgactatccaaaacgtgaaaactcaaagtatcaaaagcaaagacacctgcaaaccaaagcagaagtcaaataaactgcagaaaatattttacaaaataaagtatgcttgaagggttaagttttatatacaaagaactcaaacaaatgggtaaaaacaatctcaggtgccagtagataacctggcaacatacatataattcaacatacatataatgaaataataatatatgtttgcctattagcaacaaaaaaaatgtttttttggtttgttttttttttgtttttgtttttctgagatgttgtctcgaactgtcgcccaggctggagtgcagctgcacaatcccagctcactgcaacctccgcctccaggggtcaagcaattctcctgcctcaacctcctgagtagcctggactagaagatgcacgccaccatgcctggctaatttttgtatttttagtagagatggggtttcactacttgcctcagctggtctcgaacccctgacctcaagtgatccgcctgcctcgccctcccaaaatgctgggattacaggcgtgagccaccaagctccgccgcaaaaaaaaaaaaaaaaaaaaaaaaaaaaatttcaatagtgaatcctagtgttggtgaggaggagagtaaggtgtgatacatgccaacccactgctgggaggcatccccaagacacatgaccttttgggaaagcagcccaggaatattctgcaagggccataaaaatgtttcaacctttcagttatttattttacctctggaaatctacttaaggaaatactccaaaaaacggaaaaagttacatgcaccaagatgttaattatgccattgtttctaataacaatagtagtgaaaatagcccaacttccaacaacagaggatgattaaacaaattagaggcacatccttgggatggatcgttcagtccttaactatcagggttaagaaagaaacgtggaaaatgttgctataagattaaggggcagggagcagaattagctacggaaaatatacagacttaggctaagaagaaatataccaatttataagagtagttgtactaatacgcatttctgcacattaactttatactggctttgatcaacgatttaaccctttgctctcatttctcagttattatattctattgcactacatgcatatttgtaagtatccacaaatcttttgaataaggtagaatacaaattaaccaattaattaataatgcatagaatcaagctgtttcatcattatgatcgtagggttatgatgatacctattctttttattttcgaaatttctgtagcctggttagtttgcttttacaatgtaaaaaatatacagaacaccaaataaacaagtaacataaagaaactgctaccatatcttacaccttcagtgctccttcctatatttgatctgagaacacagcactctccaaaatgtcccttcagctaagggagaaatagggctttcttcctgtaggttctgtgagctcaggactgaaaactgttccctgaatgggttgactgctccgtgaagaccccaaggatctctagaagcccaggaacattagtggaggaccattcggatgacagacagcagctagactcctagggtggaggcgccttcccaatattcaaacaacatgggtaagaacaggatcagaaaagagactgatgtgggaaacccttccacaaagaacagatcaaaggagtgagcccctgagggcagggaccgtggaatccatctttgtactccttgctacaaatgtgatgccaagtaaaagaacccaataaatgctgttgctaatggattcacgcatgcatgcacacatgcattcactgttggacaaatatttacagatgtgccactgttctagccgcaggtgatttagcagtgaacacaacgaagtccctatccttaaagcagcttacattctaagtggggacaggcagatgataaacaaataaagacatattgcatcaggcagctatgagcatcctgaagataaataaagccaggtaggggaaaagggagaaccccagggaggcggggagaggggtgtgctggcttagttggccatggtctttctgcaggaagtgaggggctgagccatacacaggcagagggtatggcactgcagacagagggagcggtcaagtgcacaggctttgagacaggtgtgtgggcagcttcaaaggccagcaggaacagcaaagtggctggaacagagtaaacaaagaggagaatatatcacatatgaggtcagttcttgcagagttttttaggctgttcttaggacttcggattttatgtcagtgagataggaagctgctggagggttttgagtgaggagtgtcatagtctggcttatgttctaaaaggctcacgctgcttctgtgtgtacacctggggaacagaaagcaggcgagaaagggtgaaaacaagaaagatccattttgaagctgctgtaattgtccaagtgagagaggaagatggatttttttaaaactctccattttagactgagaaataaaaattttttatctgagaatccaagccccctttaattatcaaacccagagaggcaccgaaatgtgacagcgtgtgacagcgatcacgtctcactccccgcctgagctaaataatcacctcttgaagccacttgctatgtgggctcaagactaactgatgctaagtagccataaaatgacatatgcttgacaccatcactcgtactccatagttcaacagtgtagagcaatcactatccaatgttatctctgtaaaccagggaggattcctgtcaaacaactttgtatcagcccacttccttgttccttttgcctttgaaaacctgcttgtaacaaaggccaaacagagcactccccaaggcaacttggaagtgtgtcctgggcagctgtcctccaccttggctcagatattaggtcgacaagaccacggctgtctttcggtgtgaggcatatggcttcttctcactcccactctaacctggagctgcaatccctgctgaaagaattgccctctaaaggcctaaggatctcagcaacagggaagtgggaggaatcttcatgccagagataaagagctggtccatgggcatgtgtgggaagcactggggtagggcgaagaaatctatctcctgggaggtgttatcactacataaatcccagatttgatcaggcaatgtagccatctcactatttcaggctgcagctgctaagacaggtgtgaagtgggcagacaaacaggaagaaggtcccaggtggagaacctgcatttggcttctgtaccccaattccagtaattaacaaagcaaaaacctgccacactgtgaatgatggcccttcccaaccagaatcctgtttctgacaagtggtgaagacactctaaaatgcaccgagtgtatgacaaggacaatcttctggatattcccatttaaacagggatgggccggatgcagtagctcatgcctgtaatcccaacactttgggaggctgaggcaggaggactgcttgaggccaggagttcaagaccagcctgggcaacatggtgagaccccttgtctctataaaaaacacaaaaattagccaggtgtggtggcgcgcacctgtggtcccagctactcgggaggctgaggcaggaggattgcttgaacacaggggtagaggctgccatgttcgtgccactgcactccagcctgggtgacagagcatgaccctgtctcaaaaaacaataaataaaataaaacagggatgaactggagaaactgtgaaggtataggtgctgtcttgcttaggggtggggatgatttacggaaggctaacacaagggccttggttagtctaaagataatcacggcaactaggtggtggtaccaggaactagtccaccaaatcccaacctgcagccaaaaagtctcaactctcacctataaagggatccttctaaattctctagatgtatggaaatctttgacaggtcttctgaagcctagagtcatcgtataaacatagataaatagtgtagatattgcatagctatagattgatatgtacatataccatatacattagatatatgctatatatttacacttcttggcctttcggctttattatctatctccacaaagtaggacaagacaagcttgtttcccatttaagtttttctatctgtactgttttgcaaatccaccagagagttgcaggacactcctgctacagaaagatttctgccaggcaggctcagagacctgctctgttactgttctatttaataacacaaacacacaaatgggggcctttcttccccatgactttcatggcatggctgggggcagagctgggaggttttcacggcccatatatcctcaaactgctccatttccccccgatctcagttgccaccccactaactccggggtgatcagctccataccacaatcatctcctggtgatagagttccatggattttaaaagctgtaagaaaaactgagacagattcagaagagattctagtaaccccaaaccagcaattacaaatattttttaagtatttatatatacacatttttttttgagacagagtctcactgttgcccaggctggagggcagtggcaccatctcggctcactgcaacctccaactcccaggttcaaaccaatctcctgcctcagcctccgagtagctgggattacaggcacctgccaccacacttggctgatttttgtagttttagtagagatggggtttcaccatcttggccaggctagttttgaactcctgacctcgtgatccacccacctcagcctcccatagtgctggaattacaggcgtgagccactgtgcctggcctaatttttgtatttttagttagagacggggtttcactatgttggccaggctggtctcgaacttctgacctcaggtgatctgcccgccttggcctcccaaagtgctgggattaaaggagtgagccaccacacccagccacaagttttagatacttaaaatacttttaagtatctaaaattagcacctctctttaaaccttttactcaccctttcctgaccctttccttgtatcccccattccctttcgatttcttcaccatccctatttgcctccttttcctcactatctacccaccaagtcctgctctgctcccatcccacttaagattttcgtgtctattctgtatcacccttaatgatccactgaggctgtgagcttcctgtttacccacaagcgttcagcggatccagccatcctaccaagggttaaagatgctgtagtcctactgtgctgcctccgacccagttccttccaaaacaaagcaggatgacaaggtgactccacgagaactgcgtttgacctctgtgtgggttttctgtttccaaggccacagcagggtactctgaaaactctaaaccagaaggaaaggagacctagccttcagaactctgtgtgtatgtgcttacaggcaaaaaaaaaaaaaaaaaaaaaaaaaggaaccaatgaggttgtcagaaggggatactctgctgtaactggtgtttaccacgacccaccgggtgctgaggaggaagtggttgctataaccccaagggggaaacgctcgcttgaaacaggaaaatagaactcttacaactttccattagcagcgttcaagaagccggccacactgggaaacacttgcacaagcactccccagagtcctgagacgagtgtcaagacagtccaatcacgaagcacagatcaggacacagatacaggtccatgttttttccagaacgtctcagcactggaaaaactctcatgatcacttcccttacctccagcaggctgaacttgcaaggagctgtggggaggaggaaggaaggggaaaatggcaggatgacatattggaaagaacgctgggcccagtgagggtcagaagacctgggctttagtcccagttctgcgatttactagtggtggaactttgggcaaattacccaaccttcctgcttctcgatttctacttcctctataaaacagggatattgtttactgctctgctcacatccttgggctgctgtgagaatcctatggaatccttcataggatgaaactcgtatgtgctacgcaaatgcttgttatcaatgtaagattcgagtctgcataaagccttcttgagtcccagcctcttgctcctcaaacgcatcctctcggctacacttccacctgtgcacttcctcaacccaccttacttgtaattctgcccacacttctgtagaatttctgtagaagatcccatagtctggtcagaggagtataagcaagtctaaataaccaaagtggggggatctcaaccaaatcatttgactctgggctctgtgctcccacattctctcctctccagaggtgaagacttcatcctcaatggctaatttgcctgcttggaggctcagattggcccgtgttctgagtcatattttccatttagtaaaatgaacatctggctgctgtatgatgccttttgtgtaccatcacctaagccacaattacctgcaaggtaattcataccactacagcacggtgcaaaaacagggttggtttgggatggtgaaagtcagccatcttagtgtcaatcttgcatgcaaattctaatgaagaaaagccactaccagcaggtccacacacactcacaaagaactcataaattattttaatccaagcgttcaaagggatcctgggtcccaggaaccatcctgctgtttcatctcagtgagaggcaagatggttaaggaaaaacagctctagtttcctccatccccccaattcccctaccggtgtgaccttgactaggccacccaaccttctaaaaaccttggcttcctcatctgcaaaatagggataataacaagacatgcccttcccggctcccagggttattatggcaaccaagtgagaaaacagatgtgaaagtgctttgcaaaccacaaaacaccgtccaagtgtgaggtattgttatctagcaaaagtgccttgagaataacacagaaatctggaagtattttaattcgttaatggacttataccacaccttgacttaaaaaggacgtagggtaactgcctggaggaattctgaaataatttctaaataagtttatccaagcaagttgccaaaacaatccactgaattgggtagtaggcttttggataataggaaaactgcagatcgctgttctttattcttatttcaccttttgagctctaaaaagaactggaaggaccatattgtgttgtcttttacgcaagaactaaacagtctctttgtaccctccacaccctccctattctcacttccatcccctgagcacctgggaagcagctccttctccaaacctgcaaaccctcctcccagagcccaggctagcttggaagcctggagcaatttgaaacgccgtcctaagatcttgaggccaaaggcatccccatcatccttccaagagggtgttacccccagggacagcaggagtttccagaacacacaaagacttattctgctcacaaggatatttaccgaatcagcccacaagaatttgccaggatcagggcagaagaacagagctgggacagccttctgattcactgcctggcagattcacccttctctattattagcaacccaggcacgatgccaccagggctggggagagaccttggtgtcagggtagagaaggcaggaagaggtgtgtgtgcagagggggaagtacacagagctgcctgaggtttcctccagagagagacagcagaggggtgggttaaagccttctccccttcctccttagttctctaacctcctgtgaatctcagacaagcccagccccaggatcagaagccctggaacccacatccaccctgaatattgctggaggtactccctcttccccttaagggcccagctcagagctgcacagcactgcttctgccggataccactggactctgggctgtgccagaggctgcaagatggagaagcaaagagaaactgacgggaaaggtggagaatttctcttcccatggcaaaaatgcaacttactgcagccctaatgcacatgtgttccctcctcataacaatgactaccactgaaagagcacccattacatacatcacagggcgttcgcctcctgttataggcaggaaaacaaccatgtggaggctcagcaggctgccctggagaacgtggctaatgctgattgagagggacaggactgaaggaggagacgaggagcttcaccttcatgcatcttgtattatttcacttgtacaggtatttcgcgtgcattatttaacgtgctatatcaagcttgtacaggcattacttgaatacattgaaaaccatgaaacgaaggaattaaaaaaaagaaagacatgttgccagtcaatagtagagtctagatttggatagatttgtccaactccagaatatactctctggccacacctccacaatttgtccaaataccaaaccaggacatggacgctaacaaagactatttttctaatgttattcatgtgaagaattttacaaaataaccaataaccaaataacatttggttattaaatatgataaatgtggcctatggaaaataaaacgacacaaaatgaaaactggctgccatgcaaacttaggagagggcaaaggagccacagtgaccccagacttgctttccctaaagggggaggaaaatcaaatcccctgcagatggctgcagacctcaaatagagtgctgccactgagggcagaggccgagcccctggagcaggctgattagtctagtctagtggttaggaacatggtctctggagccaggctgagtgtgaattctggctctgttcttcatagctgtgacttcaggcaagcttatctgtgccccattggtttcctcacctgtgaaatgaatttgggacactgtgtagattaaaatgtaaagtgtctagcactaaacactacctaagtgttcattattattatcattatcagtcctggccagagagaaaaagggagaattatctattccaaaaggagccaggactgggataaggctttggtgagctttttacgtggtcttgacaacggtgttcatgataggcttattctaggccgctctctgctgtcaggaaggaggtttcctgtgtgaagagaaggcctcccaggaagtgacaatagaggtatcaatactcccagcaagagaaccacaggcccagagtggatgtcagaaagaggggcatctcagggagcacgcctctgcggagggctactgatgaggaagagaccacatggttgcctagaaggcaggcctgcggggaagcactgacgccagcactcaggctaggggagtccctggggtcaacttgtgcagagactggcgctcatatcccaaagaactgggtgcctctctaagatagagctccctgcctcccagtatctcttcctgcaggtgttttgttccaatggctgacagcgtctattcagaattcttaaaaatgtcactttgtttccatctgtaaaaaggaattaaaatgtaccaaaattccaaagaaaattgccccttttcagatgtggctccctgtctcccctcttcccttttctgcttttgatcttatttaaaatctctgacctaaaagtgaactctgatattccatgctcctggagttttgggaggaccctgacttcagaagcagaactctttgagttcttctggttccagctctgcagctaatttggaaaccccaagaaagttgtgtcacttctgtctcagtccagaaagtggaaagattaaccacataaactcaaaaatactatctggctctgaaatgctgtgttcttgggatagtctcaaaaaagctgagttgtggggactaacctaagtcgatattctacctcccttttgaactgatgttgaaagaagaaagacgataaaagaaggttttcctcatcagtcattcaagactatacttaaaattacattttgcagaaataaaagcagtatttttaatgttaggaaaaagtctaaaagggtgactacgggtgattttcatttctttatagttttctgtatttatccaatgatctgtaatggacatgtcacagtttaaaactcaacttaaaggttattgctctaaattcgattttgctggggagaaggttaggagtctggcttctgaaagcgtccttttcaccagtgaaactgccctcactcccaaccctgcagcaaacccgggaagagttaaagcgcaggccaggcggagagggcagggagaaaagggaactgcaaaaagcctcaacacccagtagatttcctactgctgctgacactttggcccagcgtctgcgcctccgaccagcttacggaaccaaccacacctcgatcctaacacatcacctgtgagagcagggtcaactctccagcggcctcagatggcctcaaactaagcttggggaggggttttcaaccctgaaagcccagaactgagcctccaggcagcgcagcgcccgcgaccacgtgagcacggacccacctccccagcctttccatgacgtgactgctggggcggggatggggcggggcacacccagctgcccaaatcagcatgaccccaaaagagcaagcgagttcctgaaattccttgaggtttgaaagacagcttagagatcctaagtcccttttggcagagaggggggaggtagggaagcctgagggcatcccagaaccagcaggaggcacagaaatgtgtcagctctttccccaagagaggaggcaatgctgaatgtgttaggtagggtccttttccgggaccagctggtgaaccgatgtgaagagtcggctctaatgattacttgtattaagttatccacgattcttatgaaaaaggaaagcaaatatcccacagtacaagaaggaaagaaaagggggccccaggcttttcagcaagggcgtttggaaagagatggatattgatgatagggacttttcagagaccaggctcagcccagttgggatgcaactcaggaaagtcagatcgagggaactaaaccaaggtactgttggccaagagacattttaaacgctttttctcaccaggattcataaagcccttttgccttgaagcccatagggcacaggagagctaccctgtccctgggacaaacgggaaaatgttcagccccatcctgggtgaatgcaagacctctgccacccccaacacacacaccctgtgactaccctaagtggatgtgttctttcacgttgctaagaaaaagtccgcagctatgaagtggtcagcctctgaggtccagtcattgccctgacaagactttgagatgcatgctctctgaaactcccctcccctcacctggcaaaaattattcatgccatccttgatagcctttcagctgagcgccttggtcagaaaactaaccacctgcctcttctcaccatgtcaaacccagtcgtctggtgagaagacctaacgtggggtgcttctcagtccacagacagtgttgctggttccgaggccagattgttcctttcttcctagcctgtgaataacactcccacctagaaccagcccttttgctcttaaggggttacacttcatttccctttgatttagccagaaagtttaccattgcagacacctccatctgtaaaattgggcagagaaggcagggaaagcaattaatatgtgttgagtgtgttctctgagcctaccattatgcaagacagcttgtgtgtccattctctaagttggtcttcacaaccaccctggcaagggcacagagttggtaagtgcagaaaatttgataaatccagagcccaaatctaacccaggatttccctatgccaggctgctttcctgcaatcgcctggggcatacagaaaaatacctatattgaggtaaaaggtttgatttaaaaattaaatataaacattttcttttaaagcccaatttgcatatttttgcattgtgcagatttggatctgtgcttcatcctctcccacctgcaacaacatttaaatgcctcagcctgggcactaaaaaagggagcaaatgcaggtctactagctggccatgtttttggcaaccctgcaaaacaaaatttccaactctccagatgatacccctgcctcctccaaaacaaatgcctgtactccagcatctgtcactcaggagtccaagctgggagttcagacgctgcttataagctcataggctgaatgagggcattacataaaaaggctcagagctatgtggaagcagtgtagaagcaatgtcagcagtccacctaaaggcctggctgaagaatttctcagcctcctaaaggatccccaggcagctgccaccatctcatctccagtagtcaaaggaccaccactagctgaaggctgggagggcaatgcagtggtccttgaccttggctgcacatcagttatcacctgggagttttacaaccattgttgcctgggtccccccccgccccgagattctggcttagttggtgtggagtgtagtctagcacagggatttatttgttaagctcccacatgtttccaaagtgcagtcttggcaagaaccactggacaccattggtcaaagtggcccaaaagagctaggaaaatataaataacattcagcaggtcattcagggttcttgagaacagagaatgaccgaagggacttctgtgtactggcagtgcaaggcaaggtagcaacatagagcaaagggtttggagcaaagcaagcagaaatttgagtcctagctccagcattttgcccaccatgtgacctgggtaaagccactcattcattctgagccttagtttcctcacctgtaaaatgaggctgcttcccttgctggactgtgctaggaattagctgcactagggcattgcctggcacatacaaggtcttccataagtgacacttatgattgttaataaacaaattacacctgggattgactggtgtttggtatgaagagaggctgtgggctgacagtacccttcagaggggacccctttagtgaatgagattcagacttccttggggaggagctgtggaagataaaagaagctgaaagtggtataggagacaggcagggcagccactccagcatctggggcacctccagcctttgttctccatctctagtccctttttctctgcaagttgagcctcaggaggaggtgtatatttacagggagagtctagctgtatttggccacgttctacctaccaaagtgggtagcaatcagactggattgtgtcaccctggattgtgtcatccgaagcagctctgcccaagacaggtctgtctgcccacagactcacacctgccttttccctcctactttacaccatgatgctctgagggaagccaggccctagaggggcagccagcactgcaacctgtcactgtgctgtccacgcttgcataaacctgggtggaagacacagaccctgggaatgtgtgacaactgtcccaaggcagagagggctggggaatcccaactctgcaacacctcccccttcgtgctttgagcagcccagcataaaggaacccactgcctacatgattctttctccttttccttttctctcctttctcccctaacacctgtagagttgatggagctctttctcatccattatttcttatgatgttcaaaacagccctgtgaggcagctgactgcaggaactaagatgacctggattcatcggtaagaaaacagaggctcaggcagatgccatgacttgctcccagtcacagaactcatcagaaacaggatttgaacccatgtatatgtaccaagaacccattcttctccaccatgctatgccccatgaccgcctacccatgtcaaaggccctcctgcttgctgtgtagtataagacatctgtgaagtggagacggtggcgggggaaggggagtgtagacatgcaactaatctaagctctagctgaactcagagtccccccgacttgatgctccattctaaaactgagtttgagcaacacatcattccctcttttctatgcctctctcctttcttcatctgagaaaatggcaaagccagctacccaaggacaggctggaggaggactcaaaatcaaccaccaaacatcttacaacatctgtgcctcagaacacagctttcatcttaccaaacttcactttaaagaaatgaaggtaccacaaggtaccttcattacaaagagattttgttcaattgctgggccaaagtgggaaatattaaattccagtcaaagaaggtatggatatcctgctaattccctgaggcatgttccatactgacaaaccatctgactttctgagtgtcagggaaatttccaatccaaagagtaaatgaacttccgtgagtagaaaaatagcctcttcacagcacccgattctctcccaccaagaattctctctcacctttcgcatgcagtactgacgttggggccattaggaacaaaacgaaggggaaggaaatggcaccagtccaggtgttaccagacggatatgtgaaagcaagtgtagaatcacccccaagaaactcaaagtaggagaagcacttgctcatctgttaccagatactcactgtccagctggccagcctagtgcatgcttccagaaggagaccagcaccagccagggagcagagcagtcaacctgtgcaccccaccatcctccctcgaaagcctgcatggaaggcctgcatttggattcacagagcagccattctttcaatgagcatagcagagcaggatagagcaacactttttttttctttaaccagggaaggggacccacagaggcagtacatacaaacctgaaatcagacttgttctagaactggggtctcttaaaagcccttcttctcaggcacagggtcctttccacaatagagaacactggtgaaccagctctgggaaaggtcagctaccgaaatgcagatgattgcatgcaaagatctcaggccttgtgcttttcaaatgatatcctcatatgttctttcatttgctctgcatggagactccagaaggttaagcagtcactcatatataacttacaggtaacaaaacccaagtacagagggccccaaagacgtccctagaggcacacaggtgggaccagagtccagatctgccaaggccactgagctgctctgcccatcatggagggcccctgcctgcctccagcgctccaccgttcacacccctgggtcaacattcccagggtggcagatgctgaacccacaatcagccaactcacaggtcctacatggggagagtggaatggggtcaggaaaaaccattgctttccttttccctttgaatgcctgagtagacatttaagccaagctggggaatgaaggagttggcctctgccccaagagggaaacagcccttcaacgggaacaacacagtaagagattcatccaagagtccctgtcttcagagctacctccctacacctccatctgcggacgcccctttcaaaactcaacctgtcctcttgccatccacaggatgttttaatttccttagaatgtggcacttcaaaattcagctcgtgctgagctcagtgttcagcaccctggctccacgcatgcccgctctgccccacccctgcccctaagtcctggcgacattgacccactcaccatttcccggtcccgccacattctctcgggtttcctggccattgctcacgtggaccttcaacttggaatcatctttccctccctgtccagccactgaagtccaactcaacagtaaagatgttattgactgtcccctctcccacagagcctccacagatgagctctgggcctcccagcaggctccagggcagtagctgttcttccctgtctgcacccacacggcatgaccctgccctcacaggcctccctgcagcctctacccaacgactctgtgatctgactgcatgtctctgtgaccagtgacacctccacgtcctcaagggcaggcaccagggcttgctgggctggaatgttcagcatgtaacaggtgtttagttcattgtttataaaatggacacatgagttaactaattaaaagctccacaacattgtacaaggaaaaaaaattccactttctcatccatgaagctctggagctggggaaatgaagcggctggctgctgggtgccgcggtgagctgtggggcagcacgaggaaggttctgagccaatgaatgtgatgcaagacaagaaactgaggatgggggaggaaacgagaaagagtgagggagaagaggagggggatgatgaagattccaacctgagacattattgcagaaagcaaccccaggttaacaaggcaagttgctaaaggaaagggaatggcagataaagcgaccccccgccctaaaaggcttaccagggcacttcagcagaacccaagggaaagccatgtgggccagcaggcttccgaaccagttctgtctgctctaatgaggccatgggggtggatgggcagggggcaaatcacagaagcatctgctcttgaatcaacagtgaggctctggctggctgaagaatgtctccaactccctagtcacccagtgggcctaatttcattcctggacatgtctagtatagattgaaagggaagccatagtcagtttcaaaaagaagtggaaaagttccctggggttcactgagataccattattagattggggttcccaggagcatttcttgttaagtgtcaagtccagagtttgacctttggggaaatgggggaaattcaaaaggatcaaagcccccaaactccctttagctcagtgggaaaaacccaaagctcctgccctgcctctgtgcatcctctggggccctgaaactgcgtcagcgtgcggtgtaacgtgccctccatcccagcacagacataacacaacgtaaaactcattaaagaccagaggactctgtacctatctggcactaaaaggagatctcctgccacatgtctcccatctggattctttcatgaaagatcatgtgtagctgtgcacaatgtcgaaaaaggacatcccaaagggtttaggtgtgtgtccgtttttcctaaggcttgtcctggggtgccaagtgtgcacatgccactgtgccctgggggccacatatggctgacttatctggcaatgggaggggacagagcagaactggaggtagagaaaaacgtgcagggagagtgagttattgccaagaggatttgactgtgctgtgacaacagaagtcccctgggtcttcaagcctcaggctgggatgctataatctggaacctccagggagtaacatcaccaggtgctggcagggactaacgtcctgcctcactgatgtggcacaagtcatttgctgccttgggtctctagtactgtatatttgtagtcagtgagcaaaaaggaatatttaaaaaaggaatctttctatagcgtcatttacacttgggccaaaataagatcagagtggaacaaaataaaatctggtcaagaagagaaggcagaaatagtgcagaatgctgccaaatatttccaccatgagatatagaaccgtaagttattcataagagagctcttcagagtcatgagtctatggcttccatcctcgggatgaaaacaaaaatctcacccactgtccacagtgaaacaaccaaaagtgggccttaaaggggaacactagggtttggagtcttctgtgccatctgccctcccacatcacaccctgatcccttgtttccagcctccagctcagaggccaacataggaacagcctctaccctctgtccctggaacagctttttccactgagaccaagggtgctgcccgctgtaaaggaacatgaatgagctcagaaaccacatctgcttttgcacttgtcaacttgaggctggcaaaactgaggggttccatgaaactgcagccccagcagttccagcactgtagggagcacttacctagagacacagtgccctcctgccctcctgtggccttgcttggcacagaggggccacacagataccaactgtgggaaggatctctagctgggcagcatcgccattgctcctcattgtccaggggccttttgtgtgtggctctctactcaagaccatagggatggaggtaaaaagattaaaaagatactgcttccgagtttcctcaaggagctcaccaacttccccaggtgtctggggaggaggaaagagcagctcctacaacctcaagagtctttgccaggaccagccaagggagtgtctgtaacaactatttttaaaaagaaaccaggataaagctcccaattgccctacgttttccttaggagaaatacacccaaagtagaagccataccaagtctcaggcccaagcctctggcaagaaaaaacaaatgggcttagcacttctgatagggttcacacttctgatagggttcagcaatgattaagcccctatgaaatggcaaatagtgacattatcatacaagagatccctgcagccctggagggttccagaaaagagcatagccttttaaactgcagctgcctatatatggcaggtaccatgctggcactggaaatgcaaagacgaattagacaacatcccttggggagctgttttgcagagctgttccgggaaactcagaatgtaaccacccccactcctgaccgccccccatcaggattgtctcgtgtgttcagggtcccacagaacccaagccaagagtcacccccactctgtatctttggcattagatagtaatgagggccaagaggagaggacagaaaaggaggtcttccatctgcaaagcaactcttgacagcagcagcccagctgctcggggccactgcccaaaatgctaatgaagccagtcacaattagcaggctactcaggggctgcccagaccacagagctgctgccacagtcagctgtgccagagcagcctgccgggtcccaggcagagcttttatgctagcactttctccttcccctttcacctggcatttggaatccaccaacaatctttgtacccttctctctgcctgacccacaaaaccacccaaggacgctggtatgactctcactgataaagtcaaagacagatgggtagggatagggatgggaattgggagaagggtccagaaaaaatgatttggactctttttgctcccattaccaaccactccattttcccccccaacaaacaagtgcttccccactttactgacatctggattccactggctagttccactagcttgggagcaagtttgctctccgacctctttagagtattcagcagatggtgatcaacacagccctctccaaggagagacgtttagctttatgaaaattcctaaagaaagccactgggatatgttttcgtgccaagacatctgacaactggcctatttttaaagttccaaccaataatctctcaaaagcactctacccacagacaaaggggcaatgacgaaaaaagtaatgaggccagtattatgtttttgtttttcaaacaatccagaatttacccatccaaataaataatattctcttcaaagcctacccccttagaaagctctgtgctgattccactggggctgtgttttctcagaacatttttggaaagtcctattgtggagcagcctttgtttcccagagagtgtccaggataaagttaataagcatccaaccagcagccgctgctgcgggccaggtactgtggtaggcccagggaaggggaatcctataggtaaatacaacaaggtgtctccctggcaagatgctcactatccgggtggagaaaggaggagaaggtttttgtgggtttttttcctttgtcggaaggttttatttgtgtgtgtgtgtgtgtgtgtgtgtgtgtgtgtgtgtgtgtgtgcatgcatatgtgtttgtgtacttttaagttcagaggtacatgtacaggtcacataggtaaacttttgtcatgggggtttgttttacagattatttcatcacccatgtattaagcctagtacccattagttatttcccctgatcctctctctcctcctaccctctacccttcaaaaggccccagtatctgttgttcccctctatgtgtccatgtgttctcatcatttagctcccacttataataacatgcagtatttggttttcggttcctgtgttggtttgctgaggagaatggcctccagctccaaccatgttcctgcaaaggacatgatctcattcctttctatggctgcgtagtgttcaatggtgtatatgtaccacattttctttatccagtctaccactgatgggcatttgggttgattccatgtctttgccattatggaacagtgctgcaatgaacataaacatgcatgtgtctttataataaaatgatttatattcttttgggtatatacccagtagtgagattgctggattgaatggtatttctgtctttaggtctttgaggaatcgccacagtcttccatagtggttgaactaatttacactcacaccaacagtgtataagcgtttctttaaggaagagaaggtgttttgaatacataccatcagccaggcaccgggcaacagcttttgacatgttacatttaatatggatcccaaaatcctcttagatgtagacaaccaggctcagaaaagttaaagtgacctagccaaagtcacacaacaaagaaattctgagactggtcctgatctggggctgtcaggctcccaaactggtcctctcatccccacagcagcctgcagtaaacacactctccaggacaggaggctgaggcaggataactcactcctcctacgtcaagcactcacctcctgtttaccctttcatcaagaggctctgacaagccagtgggcagggagagtttcttcagatataaaacaggacttttcataaccctagtatttacgtcaactgagaaggacagacactcagacacagtcgcacacacttcactcacacacaggaccgtcaattcaacgtgtccacctacctcacaagcaggcagggaaatcaggcctgcatctcaacacgtcaaaactagtttcctgcaatagccaaaaggtggaagcaagccaagtgccatcggcagatgactggataaacaaaatgtgatatagacacacaatggattatcattcagccttaaaagggaaggaaattctgacacatgctacaacagggatgacccttgagcacattatgctccatgaaataagccagacacaaaaggacaaacgctgtatgactccacttatcccaagtaccgaaaataggcaaattcacaaagacagaaaagtagattaatggttgtaggggcctaggagagaggggagagggattatttaatgggtagtttcagtttgagaaaatgaaaaagttctagagatggatggtggtgatggctgcgtgacagtgtgaatggatgtaatgccactaaactgtgcacttaaaatggttaaaatggtgaattttatgttatgtacactttgccacatttaaaaaaaaaaaaacctctgttttttctctttggaaatatggatgtataatctcttcctcaaacaaactctgggcacatgcatatgaccagtgtcttctattctcttcccagcctcagcccatgaggcttcagatgacagaggcaggagccgtgctggggtggggcctggctggggggactctgcatgcacagtaagcaagcattctaaaatcggccccagaaaatcccccaaatgcagcacagaacgccttagactggcctgagtcaacagcaggaaggggagggcccacaatgagcagccgcatcccctcccctgaaatttgcaaaacagtattttggctggtgcatttggcccaatatagagcagagcaaaacatttttatggaggaacaatgaaaagagactgctagtcctaagactgaggtctttaggaaaacttcattctctgacccatttcaactttccctaataaataacaatgctgtaatgccaagcagtctatcatgccaccttagcagctgtgctctgctcccaaatgttctgtttatgtctccccatcatgtcattgtgatggattcaattttaaactaccccaagctaatagcaaatcccccagagctctggaagcagctctgtgttgcgtgggccctgatcatgaaggtggattcagtggtcacccagggcccacctggagtctgtagcactctttttcctctgggctcccaggtacctgctgaaccccaaatgggtgcctacaaaggtccagtgaggaaaagttaagagccccagaaaaaacaaagataaaacgcctgggagggaatcagtatttatcaagggcctactacatgcaagagccttcaaaaccctgtaactttcaagttttatacatgaggaaatggaagaaattcagcaatatgtccaaggagcagagctaggattcaactctaagtcatctgactctaaagcttacactctttccattacactaggctgcctctcaaaatcatgtgggttttttttttcccctggttcttgttttttataatcctgcttgcctggcttctaaacttctccagcttttccataggccctagcccaacccaactttccatttgggtaaaaggaagatcatcccagctgctgtgtcccaagtcacatgaaatggcgggaagacatttcataaacacaagttcaaaagcccctttaaatagataggaaagtggaaattatttttaagggggtaaacttctaaagaaagcattcccattctgcagccctggacttcttaacataaaccaccaggtccaattctcaccctacactgccacagaacagctgacgctaaacttgggctccaaagcctctgtcttcctccagagagcctggcagtctgtgtaataagtgtgctggctatttctgagccggccactaaaagggaaagccacccccaaatcaccactcagcttagtcccaagaatgagagctgaaggtagcatgtcacgcaggggatttattcttcaaatgtagaattgttagtgctcaaaatataaatactcaggtttgaagaacataccaacttctttaaaaaaagaaaagggtaaaaaactcccccatgcaactgtgaatatactctcatttctcctcctcctcctttcctgacaagagccaacaatcagcagacaacaaaatctcaacatctggctcctaagtccacagctttcagctttttcctgggcctgggaacttttgcctcaaacaaatccctgatgagctgcttcaagtgtgatggtaataaggttcggctgctcagggagcaaggcaggcatgtgagccgtggcttgggtgctctgtcctccagggtggtccagaagcccttgaaggtagcacattacaagagccacttctggtcaacttcggtgagcagacagcacccagctctgctttctcaggagcaggactgcagtttctgttgggaatagtgacagccaaaaactcagaagcagaacacacaagacactgagctgagatctcttcgggcttctggaagcagtcagaccctccaccatgcccttcctttccctagctggtctaaactgctgtcgagcgatgatgggcagctctttgcacacagatattaggaaaacccctgcctaagagtcactgctttagaatttaatttctagactttagaaccacttcctactgggtccgtagagatcactgcctgtccccctactgacatgttttattgtaagcaatctaatttatggtgtgctcagtatattcttcatatacccagacacatacaactgaaaacaaaagtttcacacaacagtacttaccattgctttgtgcaatgaatgctgttattttctattctactctatcatattctattttattaaaatctattggttgtaaccatctaaattgatccccatttgaagatcacaatctgtagttttaaaactgctgtggtcataggagccagtcccacgtttttgaattaaaggcctgtgctgacaccatgggtcagagggaaggtgatttgtaccttattcccctttcctggataactcaagtttactcaaaaagctccacatcaacacttttaaaagagaattcaaatgatccatgcggccctacccacaatgggttctcacagcacaccttgtcttcaaggatagctctgaaagaactcaactctgcattcacagaaccattgctaataacctttaagaggtgtcagaggactaaagatgggtaactatttgcctaacattttgccaaattggattctggaagcttcagactggcaaacatagggctggattacctaacaagtgatttgtgagcatttacagggaaagatagaaatcactaaaaatatacatgtgttcattaagaaaaagtttcaacaaaccaatctcatttcttcttttgatgcaggatacaaaatcaggaagaatgccataaagaatgtgttcagatttcaccaaggtgcatgaaaagacagaaaaagaaaaatctgtgtcaaagtatggttgaacagttttgaagctgttagaacaactatacccctagaggctactgataacagacccttaagaacattggaaattgcttttattaggaccctagaaggttcttttctgagactgatcctagtcaacctttctatctatgacttctttaattagtgacagcaacattaccaattggtatggcgtgtcctcaataacaactgatcaactgatgaactgggtacccacagagcactttgcagttttatcaggtacttttacacatcttatctcatttgagcctccaagtcaaggagctaggtattattatattcatttcatagtaaagaaactcaggcttagccatcagtgtttctcaacctcagcaatatgaacattttgaactgggtaattctctgctgtcctgtgcactggaggatgtcggcagcatcctggcctctacccactatgtgccaggagcagtaccacccttacagttgtgacaaccaaaaatgtctccagacattgtcaaacatcccctaatggccaaaatcactcctgttgaaaaccactgggtaaatcaaactttgatctggcttgatcaaggtccacagttaaaaagttaaccagggcagtatttgaatttaggtctcctcattcttccaactctttcaaaaagctggaaggtattgggcaccgtggctcacgcctgtaatcccagcactctgggaagccaaggtgggtggatcacctggggtcaggagtttgagaccagcctgggcaacatggtgaaaccccatctccaccaaaaatacaaaaattagccgggtgtggtgatgcacgcctgtagtctcagctactcagaaggctgaggcaagagaattgcttgaacccgggaggcggaggttgtagtgagctgagattgtgccactgcactccagcctgggagacagagggagactctgtctcaataaataagtaaataaataaataaataaatgaaagctgggagggataatgaacaggataaattacaaaaatcaagagtcaaaattatcttgattgacattctaggccaaaaccaataataaaagactgaaggtccatattttggttttaaataaatcaattgtgcaaagtgagactggcactcatggcattttatggcagttaatgtatggaaggttggcaaagggggttggttaaccttcagcccagagactggcagtcctgcatgactccacagatgccaacataatcttggctgcactgacagggcaagcagtccaggcatctctcacactcccacccaggccagctgcccgagcattgaaccccgccatcctctctctcttctcacacctgccgcagacctgacactacctgtggggcctccccctcccctacagaacgtggctctgctccatcctcactctgtcctctggcagccgcagcaagagtcggtgtgcagcagaattggaagacagatggcaagagggaagagaagaaggacaggagggagaggacacgggggagaagacaagaagggaagtggagaaattatggcagggcccacaatgtcactgtgagccccccaaacccagggggcaagacagtaagatgagggaagagagggaagcggggaggagggggaggaaacggatgcaaggccagcaaagggaagaggataagaaaaaggcagagcagagggaaaagactaattactcccagccctccaatattcacttacatgctatgctgcttcttcttccattcagttccttcctgctacttgcccggggcacccagcttggcccattacccacccattaatgcccctacctgggaatctctggaattcactatgctggattaaaaccctggctctactagtcactagctgggtgaatttagaccaattacttaatctcactaagccttagtttccacatctgtgaaatggggataataatatctatctcatagttttggtatgggattaagtgagacttaatttgaaatatatacacacatatatatacacatatatagatctacgtgtgtgtgtgtgtgtgtgtgtatatgtatctctctctcaacacagatgcttggcccataaaaggtgctccctggtagctagttttagttataatgtacatccctggcacgtagatagcaacttattttactatcttggacaccggcttccacttccgacaaggccaaaacttagagacgaaatggcacatgcccggcccctgtattttctactgttttctgagaacataatttctagttggagtattaattactagcttggagcattactagctgctgctatttctcagggtccccttggagaccaagcaaccgctaagatggctggctttctccatagaactcacagctagcaccagcaatgaggaaatacgcacacgcgcacacacacacacgcagtctttacatctggttagggctccaagtatttcctaagtgtctcatcacacttactaaggcctgagaatctcagagctgagacactgcagaggtgatgtagcccaagccatcccctgaggcctgagtgtcctctgcagcacccgactaggggccggggggttagcacaacctgtccccattcccaggaaaaaacccagcacacagctcacactcaatgatgtcagcttcctacaggaaggacaggtacagcatcactaattaaaaagaggtcacaaccacgaagttcattcatccaggcctcttgggaacaaatcatatcaacaaccaccaaacaaatggattcatgttaatttggaggtattcttatctgagagcaatagaatatagttcaccaaagcagaaacctgggcaagcgtcaactaaatgttggtgggtccaggaagaaatccactgattcaggctaggtgcctgtcacaacttggttagcctttctgaacctgtttccttgtctgaaagatgaaagtagcaatagttgctgtgaggcgtgattaaggcatgatgcattcagaggcatagtacagtgtctggcaaagattcaagaaactttagactctttcccctttctgcaccaataagcaaatctgaaaagatcatgaatacacagtgctgcaaaatgagaaacagaatttccccctttagacaagagagcactgtgatgcagacacagccctggcatcagcaaggaaggccctggttccccttctcatcatccctggagagatgggtgtcagaggtcaggtgagggaatctctttgtgcgtgattctccaactctgcaaacaatagctggccatttcttctgaggaataagctgaaatcaaacatacctgataggcgaactgggcttgatgcagtcccaagcactctgctgagcactgaagccacttttcctcaccacaactatgggagctagagaagggaggcgattagtggtgaagacagtggggacctgccccaggtggcattagtgaaatagacaattctctagggtcctctgcaccaacccagaactctccacataagagctgccctaggaacaccacagttctgtggcctgccctggcagatgtgccctcacatctgggtgataaggggtccccaagaggagccaaaccccctgggggcagcccggtcacagccacaactggctgcccacaggctgggagccactcaactcagaggcagagtcctatgcactgcactctccagacagatggaaggacactccccccggggcagaacagcactgtagactgaaggacagctttgaatctgtctgcccaaccggttcaaatcttgttttctgtcccctaaatgtcaccagtgtaactgtcaaggggccaaggggaatcacccaaattggacagcaccttcagggcagaagctctgtttgatttatcttttgtttccacagcacctagcctactgcctggcacagagtggatattcaggaaatttctgttcatgtgaaagatgagaaaggtcacagactccttaagatccctaaagcagctacgacagctcatttctggactgagcagagctgaccttagaggccagaagggcagggctagggatgctgactgctagggggatgagaaacctctcttaaatcagagtatggaggcactgggccaattagaggaggaccaacctttcagaatcgtaagactggaaagtgtgtgccttcacgtttcattttgcctctccccagactaaaccaactaaaccatctctggaaaagacagaggccaaggtgacaggaattgttcatttatatatgaatgaggcgttgctaagtcatcagaggctggagaaaaatggaagactctttttcccaggttgccaacctcaaagttaggtaactattggcagaggtcagactaggaagaggacaggcatgatctgcaggaggttatggaaagcagcatcccagatggggcagccctccctgctccaggccactgggctagagctcagctctggactggcttctcatcctgtcctgctgactgcatagtcacagatctgctgatagtctccagacaagactagctctgctaccctggtcatatctcaggctggtaccctctccaacctgttgcacctatttgcttaaaattaagagggctgagctgggcagtgcaagaaagaactagaaagccagtctcacctggaaactctaccaactgctatgaaggacacagggaagaggtggcaggcaggaacaatgccttaagttttccccaggttccttgaactctccatggccctctggcctcccctcacccccactacctctcataaggaagcagccctggctttctagtatgctgataataaggtcctatcaggccaactgagaaaagtctcatctagaaggaaagtactcagtgcgctatctgttctgtaggaaggctgaaggcaatgcctcctggtcacatcagcaatgctatagagaaaggaaaggtgcaagagcaggacagagactgctctggctgtgtacctggaggatgatctctgaggatctctgcaccgccaagcaccctccgggctgctgacgacacggtcagattccccagtgcgtgagcctatactacagcagtgtagactacagcagttaagagcccaacagtgcggccaggcaggtctgggctctgaagaactgtgttcacatactagaattttcttggacaactgagaagtcatttaacacctctggagtctcagtttcctcatctgcaaaatagatatattaatagcacttacctcacagggtcattaggaggactaaataagccaaaatattcaaaccacttagaacaatgcctggagcatattaagcattcaatgaacgttagtcagtatcatctttactgtcagctttttgagaatagccctttctgggatattcttcatagcacccagtacagcagagcttcattaattaaaaaagaaagaaagaaagaaagaaaaagaaagaaagacagacaaacactaagctattctattagtcagggttctctagaaggacagaaccaataggatagataaatatataaaggggagtttattaagtattaactcacatgatcacaggtcccacaataggctgtctgcaagctgagaagcaaggagagctggtccaagtcccaaaactgaagaacttcagagtctgatgttcaagggcaggaaggatccagcaagggagaaagatgtaggctgggaggcttggccagtctagtcttttcgcgtttttctgcctgctttattttctatctgcactcgcagctaattagatggtgcccacccagattaagggtgggtctgcctttcccagtgcactgactcaaatgctaatctcctttggtaacaccgtcatagacacacccagcatcaatactttgcaactggccagacacggtggcttatgcctgtaatcccaggactttggtaggcccaggcaggcggatcacaaggtcaggagatcgagaccatcctggccaacatggtgaaaccccgtctctactaaaacacaaaaaattagccaggcatggtggcatacgcttgtagtcccacctactcgggaggctgagacaggggaatcacttgaatccgggaggcggagattgcagtgagcccagatcacgccacggcactccagcctggcaacggagcaagactccgtcaaaaaaaaaaaaaaaaaaaaaaaaaaaaaaacccagaactttgcaaccttaaatccaatcaagttgacactcagtattaaccatcatcacagctattaatacgatttaatatatatgtgaggcgctttacacacattgctgagttcccacataaacccaatgccaaaagtgttttcacagaaaatagcttgcctagaatgatattagtgattggccaggctaggattgaaactcaggctctgactccagagcctgcttcttcttcccaaaggttacactgcctgcagaacaccaccttctgagcccctctacctttatcagaatgagaagggagtgggggcccaaacaaaattcaagcaagagaggaagagaacacaaaaagagatgctgggaagctcagaagaaattcaccaccttgtcaaggcctgtgtctttttctggatctgggtttgtcatcatttgcagcttttgctttgactctggatgttagattacgtagagcactacatggagcacacggtgccttcaatgagaaaccagcaagcagtcagtctgaaactgtttctatagacgtggacaagacttctcacaatgtcccagctacccaatgacactgattctaatgctaacacacctccaggcacttcaaatgcttttggcactctgaccagaagctagccacgcagggtctgtgtgagccgcagcaaggctgtctgctatataagctcagaactcctgcttttggaagaagtatcatttcaacagaacagaaagtgacaccccaacagtagaattcctacaaattctaactgtgctaacatcttcctaacaacagtcctacttaaaaacttcactttggccgggcgcggtggctcacgcctgtaatcccagcactttgggaggccgaggcaggcggatcacgaggtcaggagatcgagaccatcctggctaacacggtgaaaccccgtctctactaaaaatacaaaaaattagccgggcgtggtggtgggcgcctgtaatcccagctactcgggaggctgaggcaggagaatggcatgaacccaagaggcggagcttgcagtgagccgggatagcgccactgcagtccagcttgggcgaaagagtgagactccgtctcaaaaaaaaaaaaaaaaaaaaaaaaaaaacttcactttacccattttctccaaggacttaatctcttaagctccacagagccatggagacgcacacagcaaactgtcagcacacagggagtaggaggggtgggacagtcttcccaaattctgctgctggctgcgcctgaaatgagtacacacacttcaggggcgctcactaacccacccagttgtgactgcagatgtcatgatgactgaatccttctgactccttgtcagcatcagcactccctaattctgcagaataactggtaccaaatagccatttcctgctcattcacggctcccttaacagaaaactccctcctccttcctcccctaagtcccatgcacacacagagagggaatcagaaaaggcaggaaatgcttgcctaagaccagagaaaatgccagggaagagagagacaagaaaattccaccaggtctatgttgagcagggaaattattcccccaagagaaaagttcaacttggcccggcacggtggttcatgcctggaatcccagcactttgggaggccgaggtgggtggatcacttgaggtctagagttcaagaccagcctggccaacatggcaaaaccccgtctctactaaaaaatacaaaaattagccgggtgtggtggtgggcgcctataatcccagctactcgggagactgaggcagggagaattgctttaaccaggggggcggaagttgcagtgagcggacatcacgccactacactccagcctgggcgacacagtgagactccctctcggaaaaaaaaaaaaaaagggaaagttcaacttgacggctacccctatttcatcatggtgaggtacagaaaaaggattcccttctgcagcgctgcctatcctcttctgatgacctcactgtggctatctggttacaaaggcaggcaacaactggcactaggcctagagagagatgaccaaaattgactacgcttgcacagtaagggactagatttaatccaatcatttggctccaagaaatgcacgaaatacaactactggtattctctttattcggcagatggtaatgaagacccattgggagggtgccttcccattttgtcagtctaggacctgagtggagtcccaaccgggaagcctggggcagtgtgctaaaccagcagccaacagatactgcattccaatagtggcttcttggtcccctggcattttttgtgcttacctttaactaactgttccttgcctaagctccttccaacctcaaggaactaagagaatttcattcctttctaattaaatatttttcctccaatagataatccacactgaccctatcgagggaaaatctgagctggtgtaactgcaggaggtggtttattttcataacagtaaaacatctaaaccaaatatgccctgtgtttcagcagcttaaacattgaggtctgacaagaacccgagattccactttgcctgccaagggctaagtgtgtatgctgaagcgaaagaaagtgattatgaggaaaaatggggaatgtctgagtgggtgaaggaaaaaaaaagtgcaagatattactagaaaaacctgactgcacacacaatcctatcccctacgcaggagaaagaccgagtgctagcacccggggtgtgaaagcctgcaccaagggacccaggaaccaggcgtgcctccatttctcactcgatttgtttacaatgaacggacggcgccggagtccctccgccctcagctcaggcccggttcccaccgcccgacgctggctggccgaggcaggggcgcggcgggggatttcgggcagggcggtgaagcagggcctgctctacagggggcttttcttcgccgcggtttcttcccctgtcgctgcccggcccccacctcctctctcctcccgcgcgcgctctgcccgccgcccacgcgcggaagcccgcggccggggagggggcgccgtctcccggcatgctcggcggcggtgccggtcacgtgacgggaaggcggccgcccctgtcgccttcgccagcgctagcgggcccgcagcagaggcagtagcggggcttgaaatgctgacctgcacccctggcttgcgctcccccaggcgggaaagacaagggggctgctgttgctgcttacgaaaagaatctcagcgctgctggccgccagcttccggcttgggagaaaggatgtgtttcagtctgggtttcctcatttgcaaaatgggtatactttttgtagggttgaactgtaggtcagcaggctcccaaatcctgtctttccttgtccccctcacccccaagagtaacaacttttaattaattttgttcaagagctaataaaaaaaaaatcttcatttctttggatgacactgtgcccaactccacggtcagcttgcagagcgtagcggttctgcccgaaacccatccgcccaaggcttttattttcctagatctcaaacagtgggagggtcggactctaaatactatttgtttagacccctgaaaatttttgataattcaatcttaagccgaattccgtttacctttacagtatgaaaaaagagtgactacgaaataaagaatataaacattaatagtacaagcacttcagaaaaatgtttagcatgccgtaaaataccaattacaaagcattgttaactctcaataattagatctccgatgtaattatacatgaccaataaagtaataacactacttatctttaaaaacattaatataaccaagactacccacattgcaacaggttatcatacctggtcaacacgagaattccctgtaaaaaagcttctcgtgtgtgctaatgaagatgtgtgagaatggagaataactcagctagtttatttcctgggcatttatgaaaaactgaattgagcgggcagcaatgaaaattgtcattctggggaatgcaatatttttccgctttggggaaatgagcaaaaacatgtgacaaaagcactggagataaaagtgacactgggaaagacagtttacagtggcttgaaacaaagcagtgcatcattctgccaactttacagccaagcttttttcagagatcattggctacttaaacagtaagtaatggacgttcaacaatgctgtgcccagtctaaaactaagaggcttttatctctaccgatgacatgagaaaacctgtgactacacacagcctcgacttcatttgaaatcttgagctggaatgacttttcttaaagtcagaggctcctttgcacagtggaacaaactcctcataaaatttacaacttgaaagaagtactggcaaaagcttgtactttttaaaagaatcacagcattgctcttgcttggccaaatgtattaaatgttcagagatgaattccagaatagataggagataagaacagcatcagtaactgggataaaaccagaagggcctaagaaaagttataggtcagttactcaaaggctccccacattcaggccactctcccacagagcaaaattatcctaacattatgtaaaacatttaggtgctaattcctttatccctcatctcacatttttgatgtgagaacattctgatggccagaggaagagaggagagtccagaaacatacaacttgatgtcggtcaggcacagtggctcacacctgtaatcccagcactttgggaggccaaggcgggcaggtcacctgaggtcgggagttcgagaccagcctgaccaacatggagaaacctcatctctgctaaaaatacaaaatgagccgggcgtggtgacgcgtgcctgtaaacccagctactcgggaggctgaagcaggagaatcacttgaacctgggaggcagaggttgcggtgagccaagatcgcaccattgcattccagcctgggcaacaagagcaaaacgccatctcaaaaaaaaaaaaaaaaaatgatgtcaaagcttctgattttctccctccttccccaagcttcctgggtcaaatccaaatatgcagatgtgcctatgggcacatacgggcctgaataccttcaatttcccaccaaggagacttgtatctgtgactgcctccaccccattccgggaggctaggctggcctccacagttggaggttgcaggcatcccctctccagctatatcaacttatactgcatgttttctcctgacccctgaggacagatctttgaggcccgaatcatttcttaggactccctgtcaggcaggtcatttgaggaattagaaactctgaagtccctgggaaccatgcaagcccagagtgctgggaaagcacttgtagagccatcagaagggattcccctcacatcttccaactcccaagcacccatatgttcacataaacatcaacccaaccagtttgttgcctcttattccaagctgctaaagggctggaagaggaggctgagggtcagcaggcagaggctagtatctgctgggaattgccagaaagatgatccccctcctgtgaggtgaaggtcaaaaccaagtaaatcccatttccactccacaaacctgtaagagttcaattgtttaaatcaaaggcagtacgaaatttagaaagattaagatgatgggaaagaacgtggtaccacaagttgaactcaatcctggaaaataataaatgataaaacaataaataaaaatacttgatagtgaaacccattgggctggacagtggtttcctccaagttaagtacaagagactcccttttatccatttccatacctagggttcttgacagaaaactttctagaatgtgggttttctgagctgagagggacttcagagatcaacaagtctttgggttccaaacctgaagactgtgggctaggatctagacaggcttcttgttatcaatgtcctgaaagggcaacatggcctgtgaaatgtgcctctctctggaaaaagggtgtgtggctttctaccactttccaaaatggcataagacccaaaaggggttaaaaaacactgatttggtccagctcttggatttcacagataagacccagaaaactcagttgagtgctccaggtgacagggcaaattatatgtcaccttctaaagctggttggggcctgtgggaggaggaggaggataccactcgagctaacaggtcttttccatttctaattacaaggattccatgaagtttccagccgccagtctgtctggctttctgggcctgggtgtgtcagtcgccactctgttgccgaggtgcacagatggccaggggactggggtggctggatatggccagcagccagctggctagcatccaggcatcagctctcagccaaatttcttcctgggggctcaaaaaggggtttccaaaaagtccagtccacagaatgaggcacagttcaatcctctagggactcatcactaagggtggttgcataagaaaaattatgaaaaaccatcaccctccagtaccatatgggctctatttccaggccagcgcaattaagaacaatttcacaaggaaataaagggacctagtagaataattcagaataaaaacattattgccaaataaagtacaatctttttttattttttatttatttatttatttttgagatggagtttagctctttcgcccaggctggagtgcagtggtgctatctcggctcaccgcaacctccgcctctcaggttcaagcaattctcctgcctcagcctcccaagtagctgggattacaggtgcccaccactacacctggctaatttttgtattttttagtagagacggggtttcaccatgttggccaggctggtctcaatctcttgacctcaggtgatccgcccgccttggcctcctaaagtgctgggattacagatgtgagccactgcgcctggccaataaagtaaaattttaagagaaaaacatggaatggaagaatatttgtacattaagtaactgacagcttactatataaaatgccatcaacatgttcgggcagtgggggctcaatggggataaataggcagtgtacacatgagtaactcaaggccatcatcacaaggaaacatgtagagtccctcttgaaaactaaagaattacaaattacaacttcaagggacagtaagacaatatcaaactacaaacaaaatccaatggtcgtagggaaactgcagcacttagactttacagatgaccccgtaattggctcagtctttccagagagtagtgtaggaagatgaaatatgctatacatcattcttggtattggacgttgccccagcagtaccactgaggggaacacttcccaagaagtcactaaagggagaagaaaagaggtcattttaacaaaaatactcatggctgcatatggcaataactgcaacaaaatatggaaactacccaccaaaggtaggagtaagatgatgtaaatgatgtagtagctcaaagttcacactcaggaatcagaccacacagttgattactgtatgaaatgacgttaaaacaataaaagataaaactagtacaatcagattgcaattatgtaaaacaaaattaggcaattgatcaaagaccaaattggatttacaacgattgtaaatacctagaatgagttaaatcattcatttagtcgtggttatcattatttagtcatggttatcattagcttctttctctgtaatgtttaagtttttgttaaaaaccaaaaagaacaaaaaataaatcaaacctgcctcaaaccgttggtagaataacagctcaagggacctaactgagacccacccaaatgtatgctctttggagctactcccagagtcaatactaattgttataagccactcccatgccagaggctgacttaggcacgagtaactcgagacattctggtcaatgagacacaggggatatctgctgggagccttctgaaaaagatgtctcggccttagacaccatgaagagccatcccctttttcctccaagggatattatcatttccacacaggacacgaggccctgtagcacccatctggcaaccacgaggaaagatgagtcaacacgttgtgagacagggcagagagatgcagaggacacaggtctttcagtaactctgctatgctgatgaattagccaatgctagaactgcctgtgctgggacttactgatcaaggtgaaagaatgtgttttctttattgttcaactctactgggttgcagttttctgatacttgcagctgacagcatcttaactcgtgaggcagcaagcctgagcagctttctgatgcaggcctggcaggccatgctgccctaggccagtattctgccaggcccctcactgtattccattctgggggagagcctaagggagacggaagaagacactggtgaacacgagttacaccaggcctcagaacaactccagatggtacagcaagcaggtggcagcagtgggcagcagagccccagacgtctggcccctcaataggggacctccagaggcctctgggccaccagctgtctcctttctggattcacccatttcacaaaggctgtgacaaaactgccttctgggttagagctgccagaaaaagtacaggatgcccagttacgtttggattttagataaacaacaagtgactttttagcatgagtatgtctcatgcctttattctggctgcaccccctccctggcgaggcaccaggctagcaacatccagaaacagagatggcctcccctgccctgggctgcctgtctgggctgccgtgggtgtgtctggcccagtggtaggaggatgtccagtgtctggcctctccaggtctccgatgggtctaggaatgtctgatgtgcattttatagtaacagacaagaagtggctaacacttaaaatgtatgggtggggtgggtgtcactgcggtcctgggacacttggaaactatgcagcaggctgtggaggggactagggtagaggcaggcacagtggctcctgacatccaacttccccccaacaagaacttcctaggtaaagcagaagacgtgatacttccctgaccttcctttgtctaaatatgaaacttccatgactggggaccaacggtgagaagcggcagtgggcagggcctagccctcacctgtccctgtctacaggcccacctgacctgcaattaggtttcctcactgtcattctctcttgggccatgtcttacggcatgatactcctgcccaaggacagtgcttaacttgtttggtgcagcactatctccctgcttgaagagagtcccttagtaaagcttgctgatgagagcagagcctcatttcttgcaaccttgctttatggttccctgtctagtatcctgacagcatcctgcctggggccagcactagctcataactacctgggaagaaatcactccctaatgggaagattcacaacccacccaccacaaaattcagccacatcccagtgacagataaatctgtcttccctgcccctgtctcctctcccctgactcacggcctccttcagaaggtgccgtgctaacaggtagcattggaaaagaagtctggggtggggcagctggtgattggctggtgataatgtccctcagaagaacagaaagggggaaacaaatggaagcacctgtgttcatggtgagcccttttaactagttatttctttttagaaacgggagacagaaaataaacagaaactgcagatagcaatgaagtaagcaagtaggggccagctacgtaagtttcagggcccagtgcaaagtaaaaatgcagcgcccttgttcaaaaagcaggaaaaaagtgccataaaacgtactaaaataaaccgtttccttcctttcttctgcagggtttctctcaacttgatacagtgtttcttatttgctgtttaatgagtgcagagtctcacaagatgctgggatcccgccccttgactctggccactcttaagcgtctactgccgtcctctaccaggtgctgggccaggagcagagaggtcccctcttcccacacacctgcctgggcagacccaaagcgattacacactcatgctgggacacgcttggtatttggatctggagtgagctggattctcatgcagttgtccactttttggccctgccagcctggggtagggatggccaccacaccctgccttgggacaccagtgacgccaactctatccctccctgaaccttcacccaggcccctgatgggatcagaagagtcagtagttgccaggggtggggagaaggaagtcaggtgggactggagcccagagaattcatgcttcattgtcccactggacttcacttacaaacaccaactcaaagaattattaagaatttcaaggcagcaatgggccaggcattcaaccccaaaagcagggcccttctgagcatgcggcctgtgcaactgcattcatgaagctggccccacaggtaatagtgcttattaagagacatcttattaagacattcttattaagaaagaatgaaaacaaagccaaacaaaatgcacaagattctccaattaactgagggtgctcagtcaattgggtgctcataaataggacaaaaaaaatgaaaattcttcacttaaaaaaatttggccaacaccatgtccaagctgacaggacatttctcagcctaacatcctctacctccttcctactccacctccccaaaatcctttgactccagttcgatatcctcttgagatgttgccaaggtaaataattccttgcagtggttcctaaccagatgcagtacctgcctccagccctagagggtgttttgaaagagagagagagagagagagagagagagagagagagagtgtgtgtgtgtgtgtgtgtgtgtgttgtgtatgttgcacaatggcaaatagtgctccaaggcccagatgcccagatgctcagtgaccttcagtgtgctggacagtcccaaacaatggggatcgtccgaccgaaaatgacaatcatgggttgtttgaaaaaactacccagggaaattgcaaggaaccaacgcttaaatggaaacctcccaacctggacctcccatcatttgtcctggcgatgacgagtgctgaacagaagttcctcaggagtgttgcccatccccatcccctctggagtttgagctgaacccactagggtgtctgctcatacttagcatccctcaccaccgtgtccatccctgacccagagactccatgttaaaaggcaaaagggggaagatgaggggcttccctgtaggctggtaccatgttggtccccagctcagctagtgggaagctcactagggtgaggttgggcatttgcctggacatttttattctcctccctgttctgcaaaaggcctccctgcggggaaggttttctctctcagaaggcgtccctcaccctggcctcagagctccgggagaagggcttcaggaaatgttctccccggtggtgtacagtaagccgcgagggtggaaacttagcaagagtgagataatagtcttagttttatatatagcacctgtgtcttccggagacctcagagcatggggtaagggcagggtttaaaccaccttcccaccgcacgagagatgggcagggctcactgcgaggcaacccctctctctgagtcctgctgctgccccctgtcctggcagcccagacccccttcctgggaactggcaggccctcgtgaggtccatagccatctggctccccagccttcgtggtcactgcaggcacagtcctgatcctaggatacgtgaagggtaagtgggtgttcatagctactccacctgaatggacaactgacaaggtgaagaaagccgaggctgtgtgcgccactgacaaagggccttctttactcaaattcccagagcctgggcacttgcaaacacttcctacatagctgtatgcaacatgcccattttacagccgggaaacaaagacgttgaagggaaggtggtcaccgtgaagggagcgctcggctggaaggaagtgggctggcattgccctagccctgcactccctggacggcctgtgaccttgttcaggcccgtctgtctgttctggccctgagcattaaggctcctcttaaattatctggtcctgtgtttcctgcttaagcacccagaagggcaatattgctctccgaaggagaaaagaacaatacagattgcaggtgtgaaaatattagcgtcccggtgcatcacggagcaccctgagtgtctgcttggggagggaggaaacacacaacccagattaagcagctatcagcaaaccacaggatggtcagtaacgctcacgcagctgcacacaacttccatcgcacccctccagtgggtgtacgcatgtgcccacccacacttatctacacacccacatatctacacccatacatgcatgcatgcacgtaaacacacactgcacacttacccatatacacacatgcatgcacacacacatacacacgtgcatatgcgcaaataaatatacacacatatacacacacatacatacacactcatgctccgctaagacaccagaggtgaggagactccggacccagctggctattcgacctcttcgcatttctagaatgcccccgcccccggttcccagacggctactaattctgccttcctttgagttgctgcctgtgtccccttcctcccactcccacatttaccctggcttcctacacaccatggggcgaaacagttcagaaatagagtggaaaccaggtttggagagaacactttattagggagggaagtggcaaacaattgctatttttatttttgtttctctaaggcctctgtgccccctctgtcaaggggcgacaaggacggcgtcctccccacaggtttccggtgtcatcccgttttagatccactacggccaggcaccctatctcctcaccccagggccagggccagagtcgtggtctggaggaatttctaacaaggagaatgctccttggtgtataaggaatttgttcggggtttactaaaatcatccagaatgttctcagtcgctactgttggcatctcttcgctctcagactcagccccataaattcagagttcacgaaggacaccctcctgctgcttgacacttggctcaggctttaaaactgttctttttactacagtgacagccaaagaaagcatcctgggtgttcagataacaatcagtgtcctgaacaactacccctccacataaaacaatctaccacatccaggctatattgacttcaatcagttctatcactcccaccccaacatcctgactctaaaaactgagggcttgtgacctggtcccacaaggactttccttgacttactcagataattgatattttttaaaatcttgaccgtctatggcaaagggcccttcttgaaagccaagctaggaggctctcagagagcagacaatgagttgtgtgtgcttgaacatttcaggtatgagcctctgacatctatggtacacctgagtgctgtccccaaatatttctagttctcctgggcacatggtaggactctactctcttggccccttaaaattaggtgaggacagcagacttacctggccaattaaatgtgagcagaagtggtaagtgttgcttgtctggaatgtagctttacaagtcagtatgtgattcaccatgttctcattccctctgtacagtaaccagcaccatgagaccacagctgacccagatcaggtatgtggcatgagcagaaaataaacctttcttgttttctgctgccaattctggggctgtttgttactgcaacataacctagctcatcctgactaacacaacacctttgatttgaagtaagaatgacatgaagagctgctgtaaccctggcttgctgtttgaacagaggaaacaagagaacagcactgaagagtaaattaaagggtctatagaaaactacctgtcatcctcaaggttgccctgcttcctcctgctgccatgcttttgtgcacacacatccctttactccagatagtcttcctttttctctgactacgtgaatcccttcaaaattcaactccaatggcaccatatctgagaatatttctcttctccaccaccctaggtagtgttggcatctgtcctctgctgtcagcaggaattgggacttcacactgtaaacatgcttattctctcccatagcattcactcatctgggaagacagtacagagtggtgggcacaagagcaggctctagagcagtgcttttcaatcaggggcgattctccccatgggggacatttggcaatgtctggagacatctggttgtcacaaatggggggaggtgctactgaccagagatactgctaaacatcctacagtacacagagcagccccacacaactgaaaagtatctgtccctaaatgccaacgatgagaaactctaagaatatcttggttcatagcctgactcttctattactatgattttagacatgtcacttaacttctccttcaatgactaccacataataaaagcataataggtattaggtattacaatctgcctcctctactaaacttcgaatccctagaaggtaggaactaagctatgcttgtacatgtatccctactgccagtacaccatgaacgtttgtgaactccatgggtaaagcgttagttcactcttttctgaaagctagttagtcgcaggtagtagataaaaccctctaccttgcaccaaaaagacaaggcctgtgcgtgcattctctttagcaaaacctctgctggttttaatagaaagtatttattctagttcattgcgaagcacaaatgcaagtatagtaactctgacccagaagatttaagaaaccagaagatcaacacacacaaccatcctggaagaatgtaagttcacggaaattaaattttataacaatgatgccatctggagaagtaacttgaatcaaaatgaactaactactcaccaatggccataatatattttatgtattcaaataaaccaaacacaaatatcagattgagtcaggaatgtaacaagaggtttttgtatagcaatattttgttttatttttcccattcaacgtcaattttctaggtattacaagttttctttctttattaaaccaagtcatttgaaaccttcaaaacgtgcaagatttcctgattcacactgtaatactctattgcttttatttttatgtatttatttttgagatgaagtctcgctctgtcgcccagactggagtgcagtgacaagatctcggctcactgaaacctccgcctcccaggttcaagtgattctcttgccttagcctcctgagtagctaggactacaggtgcccgtcataatgcccggctaatttttgtatttttagtagagatgaggttttgccaagttggccaggctggtctcaaactcctgacctcaggcaatctgcccacctcggcctcccaaagtgctggcactacaggcgtgagccaccgcacctggccctctattgcttttacatgccattttctgagcttataacatgttcatacacttctaaccagacgacttaaagtagtgtggttgatgtggaaaatactaagaaatcccaagttgtggcatgcagtaaaaatgcgtaagaatagttttgtatatctcatataaacccaaatcatcttctgtcaaaaattgctctacccagagaatttctgttcttcccatactctaaaaagagattctgtggctctaaaatctttttctttatttttttctaaaaatcttctctttttattttctttttaaaatgtttttattttatttgaagttctaggataaatatgcaggatgtgcagttttgttacataggtaaacaagtgccatggtggtttgctgcacctataacccatcacctaggtattaagtcccacatgcattagctatttatcctgatgctttccctacctccacccgcaaaaggcctcagtgtgtgttgtactcaaagttttttttaaaaaatctgttgaacaactgcaaccagcatcaaacctaggttttcaaaacgtaccaaaacggaaaaatattctgaaccaaaccatcatttgattcagttccaactttggtcttgagcccaatcaaataaccactgaaacatgctggacaattctagtgggccacggggactgggtggaaagcctgtggtcatctgtctccatgagatgatttccattccccaggctcagggaatacatgggaaaatcctctgcccattttccaaaaatcctttaagcccatatagaaaacaatactttctttgtgatagattgtttatacaaattcaccaaaggagattttgcaaatattatatagacttcatcataccgagggagaaataaccatgccttttagtttcttctgattcactgaaatgaggactaagatgctttatttcacacactaccgggttcatgtatatcaccgggcagaaaaacaaacataaataccttcttaagcagatgacatcttcccctgtttctcgatggagaccaaatcctcccgcaggtactcaaactagtagcaatcccattaactctcaagactactttctgctgccccctcctgagacaggagttaaaagatggcaaggacatgggcaagtggcctagggtgcaaggtgaaatctagtgctagctttaaagagaaaattccttccatctctgtggttatgagtagttctaaattacataccccatgtttcttttttggcttaattacaataaaaaggggaagcatctctgggaccttcagcatgactatgttgcaaaactaaacccaaagcacaggcccaggctgcagagagacaaagggaagcaccagtggcggaaaggaagcctcacccagagtggggcctggtcctcagccaccatctcggaggcgcccagagggaggtggcaaggagacactctgcatctgcttctttgtttttctttttatttccaggccccaacaatcaataaacaactttccttaaataatacagcacctgtgagtcagcctgggtaagctcctgtggagacggagctgggaggtgatggcatgtgggcaggggccgccgtccgggcctcctacacaccacagctcccaccgggctgcccgccaaggggcatgactctatcctggagtcagaggacactgggagcaggaagcgacctcagagatgaccaaacaccttcacctgaagccctgagaggcaaagcccaaacaggaggccaaggcttttgacaccctgcccgtttttatagcacctctgtggaattgttcattttctaagccagatcattccacagaaggagacggtaaataagccagtgaaaaaattaacatcgccagccattagagaaaagcaagttggccgggcgtggtagctcacgcctgtaatccccaacactttgggaggccgaggcaggcggatcacaaggtcagaaattcaagaccagcctggccaacatagtgaaacctcgtctctactaaaaatacaaaaattagccaggtgtggtggcgggcacctgtagtcccagctacttgggaggctgaggcaggagaatcacttgaaaccaggaggcggagcttgcagtgagccaagatcgcaccactgcactccagcctgagcgacagagcaagacttctcaaaaaaaaaaaaaaaaagagaaaagcaagttaaaactgcaatgaaggctggcgtggtggctcactcccataatctcagcactttgggaggccaggagacttgagaccagccttggcgacacagcaagaccccatctctacaaaataattttaaaattagctgggcatggtgctgcatacctgttgtcctataaatcgctacttgggaggctaaggcgggaggatcccttgaatctaggaagtcagggctgcagtgagccatgattgccccctgcaccccaacccgggcaagctacagaacaagaccctgtctcaaaaaaaacaaaacaaaacaagacacagaaagaacctacaatgagatggccttgcatacctgcatacctaccagagtggctaaaataaaagtagctacttagctactaaataaaacgctggcaaggatgtggagaagctgcagcactcatacactgctgtgggatgtaaaatggtgaagccactctggagagcagtgtggcagtttcgtaaaatatgaaatgaatgtgcaactactgtacgacccagcaactgcactcctgagcatttatcacaaataaatgaaggcttacatcacacaaaaatgtgtacacgaatgttcacagctgctttattcaaaatagccagacctggaaatgacacagatgtcccctcctaaaaagtgaatcgggggccggcacgatggctcgtgcctgtaatctcagcactttgggaggccgaggcaggcagatcacttagaggccaggagtttgagatcagcctgggcaacatggtgaaaccccgtctctactaaaaaacacaaaaaaagtagccagttgtggtggcgtacgcctgtaatcccagctactcgggaggctgaggcactagaatcacttgaacccaggaggcagaggttccagtgagccaagatcacaccactgccctccagcctgggcaatagagcgggacaaaacaaaacaaaaaattgaatctgaatctctgagggtagcatagcagagactgaggaatccaactttggtaaggaatcctggtggtcgctccctgctgacttaccgtgccctgtggtcggtcacttgccgccccacatggcctttacgatggaggccacagcctcacttggtgaccgcagctgtgctcctttccagggaggtgccacacccttcacctctatcacctattgagaatatcacctattgaaagcctgggcattctgtgtcctggcccctttaggccctcacccatgtctcctaatttaaatgaggatttaacttaatttacctggaggcaggtaactcaactcgattgcattcaattcctgcttaggtgctgacattataagcccacaacagcttgtacctgttggactcatgcgcaggccgtgcagctccaggctgcctgggtgcttcacagtatagcagtacctagcaagccccacgcagcacagaggcccacgatgctctctctgggtggcctgaggcatctggacacgtgcagatccatgctctgtatctgctgaaaccctctttcccgtgggcagatctgcccttctccctgtgggaggcaggctgagtccctggggacccggattacagagtgagtgccttggggtgctccccttttctgctatcaggggcttattgccctgctatgtctgcagcaatgaggagctttaaccttttcctgccctttagggttaagagttctcttccagttcatcagcctaaggaggcagctccaggagctcacttttgctgcagttgcatctattacatcccttttttaaacaaaggcccattcatttataaggaaaagaatccactcttagttccacctcctcaagtagaaaatttttaactagactaaaacggtactccaggggacctatgtgaacacactctctttcccccggggtccagtatttccacggcaacaaccaatcctaattccctcagccacctcccagggctgtggttcagaggccccattgctccacccatccacctctgcattcagttcagttagtccccagtccccctaaagcacaaggcccagaactaaattcaaagccaccttcctctgttctccaggcgacagctgatgggtggcagagaggacagggtaggaacttgggagattcagatgagttaaaatcccagtcctgccattgatcagctgtgggcttgggactaacaatttatatgtctcatcctcatctctaaaaggaggaaaataatgaatgccctgcaaaaattacataaagtatttgacggaacatgcctggcacataataggcacttctgaaatcattgctgctattatttttattattattgtgcatcctaagactgtttagtattttttacagccgtaccacctgttaattcatattgaactggtagtaaaattataactcccagtgaatttcaaaagaaatattggccgggcgcggccgggcgtggtggctcatgcctataatcccagcactttgggaggccgagacgggcagatcacgcggttcaagatcagcctggccaagatgctgaaaccccatctctactaaaaacacaaaattagccaggcatggtggcacctgtctgtaatcccagctactcaggaggctgaggcagaagaatcgcttgaacccgggcagcagaggttgcaatgagctgagatcatgccagtgcaccccagcctgggcgacagatcaagactccatctcaaaaaataaaataaaatattggccgggcgcagtggttcacgcctataatcccagcactttgggaggccgaggtgggtggatcacctgaggtcgggagttcgagcccaacctgaccaacatggagaaaccccgtctctactaaaaaaaaaatacaaaattagccaggcgtggtggcacatgcctgtaatcccagctactcaggaggctgaggcaggagaatcgcttgaacccaggaggcggaggttgcagtgagtcaagatctcgccattgcactccagcctgggcaacaagaacaaaactctgtctcaaaaaaaaaaaaaaaaaaaaagaaataaaagaaatattgatgagccaggactcctccatcctatcctttgggcaactgacttttaaatacctttatggggaacttatgttcccttttatgacatctggtcatggggtcatactgaactattttcttttttttttgagacggggtttcgctcttattgcacaggctggagtgcagtggtgcaatctcagctcactgcaacctctgcctcccaggttcaagcaattctcctgcctcagcctcccaagtagctgggattacaggcgtacgccaccacgcctggctaatattttgtatttagtagagacggggtttcaccatgttggtcagggtggtctggaactcctgacctcaggtgatccacctgcctcagcctcccaaagtgctgggattacaggcgtgagccaccgcacctggcctttttttcttttcttttctttctttttttttttcttgagatggagttttgttcttgtggcccaggctggagtgcagtggcacaatctgggctcattgcaactcccgcctcccgggttcaagcgattctcctgcctcagcctcaggattagctgggattacaggcgcgcaccaccacacccagctgattttgtatttttagtagatacgggatttcaccatgttggccaggctggaatcgaactcctgacctcaggtaatccacccacctcagcctctcaaagtgctggggttatagtcatgagccaccgcacccagccataaactattttctgaagttgctcaagtcttctttgcaaagtcagtgttcccaaactacagtcagaggccaggctcaaggttcctagcaacctgccacctggtacattcagggcactcgcccttcaagcacaacatggatccttggggctccttgccactccaactcctaggagactctcctgccttcccctgggaatgtggtatttgaggccaatggtgactgaccagaaaatctaggccagttcaaaatgccaaagacaggatgccaggaaggacccagaacctgcagggctccgttcagcttcttggggttaaccagcagtctgcagaggcgggagacggctcggctctcaggagagagcagctgatttttaatgtacagtgtaataccgcaaggtaaacagcatcccagacgctgctccatatggctttaccctgagatcgaaactaattaccattctgtgtatatttccaggttggggcaataagggagttactgtccagcacattcgccatcagaccacccctgaggtcaacactgccacgtgctaacaagctcctttcgtggtttcaatcctcccagacatcagtcccttcatcctgcaaagggcagaaagaaactggggcttggggaggtgttagggcaggctgagcctgagacacatatgtctagaaaggggcaacgtctcaaaactgcacattcagagcctggaagctctgtacagatgcctaatgggtcctggggctagaaaaggtttgaatagatcatcctggacagaaaagatgcaaacccccaggggtcaaccctgcaggctacctgctccccctgccccccacccattacagctgaaaggaaggagagagttccatttcacacatcctgtgtgtagcagagtagagaccagggtttggcaggcaggatgcccagggctgtggtgacgccagtccgtgctgctcagatggaacctgtagccatccagcccggatcctgcatgggttccagtaggccctcctgggacttggaagtgagctggtgtgctcggggttcatcagctccgtccagtcacctgactggcttttccttccactccaccatcccagcccagatgacaagggcacagtatggccttgtgacttgggaagtcctgggtaggttctctgtggctcacttcaagaggaggccagggtgacgcacagtgtacttcagagaccccagagccacctggacctgagtccctgtgaatggacacgtgacgggcctcactgggtgtgcagtaagataaaacatctccttaatctcagagagagcctgtgttaataagcacgtgcctggcctggcaccagatgcggcacagagaagagacgaagactaattaaatcacacacgtccagagacctccttggtaagaaaagccacaccgatacagagtagtgttgttctacacacacacgtgtgtgtgggtgtgtgtgtatagagagatatatatgtatatatttcattggctctcttatgagctacagtgactctaaaagatgcaccaagaaagcagaggaacaaggggaagggagggaagggacagaggctttcacaccccaaatgctgggcattttgtgtctggatgacctcagccagtttccacctacaaaacagaataaaaagaggctggtccccagggtgtgtaacctgacacctcttgccggcagctgaatacaggggattgtttttttaaacttcaagttccaatccctagtaacaaagtgaggcctctcctgcaactaaagaacctccctggaaaaataaatcctgctgcctgttttgtcatcatcttcgacaattagctgtacttgggacaacgtgactcgagccaattggtgaaggcgattagggcatccacttaaaaacgctcttcacaactggtggaggggtgtcctctattccacccctgttctgcacccggtacttgagctgcattatctcctttcatcttcacagcaccccctgagagaggctcattatcctcatgttagagatgaggacactgagactcagagatgttcagcccacgccaaggtctaggacagagtgagggtgtgggttcaggtctggctggctcgggctccacactccccagcagaccatcttgcttctgtgctcagcagagcaagcctcccccagcacacacttcctacaaacctcaatgtcaaagagctcccagaccccatgacttctcctcttccaagggaagaagtcagcaacactgcctcagacacccttattcactctcacccaatcaaagagaatggtggaggtcgcaggttcggcataaaatactaacaaatgacaccacagctgcctctgaggtccatgctattgtatcgagcatttagtatgtccagacgctgtgctaggcatttcccacattaccttgtttaaggctcacagccttaaggtgggtattatcagtcacatttcacagatgatgcaactgaggagcagaaagttttctctagggtcacacagataggaagtaacagagtttagactcaacccaggactacacctcagggttcttcccctccccctagagctcttccatagctaagactctataacgtgtactaagcagaaaaacccctgccgagctctcctgaccatgtccttctggtcaatcggggtcctcccgagagcatagcaacagtgcagctgactgggctctgcaccgtgcaactgctgagcatcaatttgtgcagaatccaacgctccaaatcaagtactggggcaggggtgccctctttcattccagcctccgtgagcctctggatccagaacagtctctttgatctaccacttctaacagagggagcaaattcctcaagacctttaccccagactccttccctagaggctgttgcccaaatccagttcctttactccctgttccaca[450 bp omitted]ttcactttccatgacacagaagagaaaaccactcaaggtactggaaaagtccatgcccccattaagtaccctcaaactctagagtgcagtgcagtctccctatcatgattcagcagctggcagccctgttcagggagcatgagacccctgctttggggccccctccttgctcactccagccttccctggtgtctgttacatctgcatgcccactgacgaatgggcaaaccacagccggaggaggctgcgtccacagtctacaatggccgagatggtcacacaggcaagaggagacgatgctgcggctgaagtgaaaccggggcgttatccagaatatctcctcatcccaacccgacctcactgctccgtccacctcagaactggctctgctgtggacgcagagattgcttttaacatagtccttagcaatttcttttcaagcaacaaggtcagaatactcttcatgagtgagtgcttgcccttgtccatcctctttttgtaaaaaagcaaagtcatcgtactcataattaaaaactcatttaggcaggaaataattcactgtccccaaatgactgtatacacgtcttatttggactcacaaagaccacatgaggtaggaagactatcaatatacccattttacagattgaggatacccaagtccaaagaggcccaatgaggtcaagtgctggatctgagagtcacaagtctttcaagcacgttcacttgttaagcacaaaaaacattctcagaggaggtcttgagtctcctcaactacttgcaattagccagatggtcaatattaatgagtgtttaatgctgtgatgactatgatgatgatgaaggagaaaggttaagaaaaagagaaggccaggctcagtggctcccagctgtaatcccaacactttgggaggccaaggcggattgggaggccaaggtggaaggatcgcttgagctcaggaattcgagaccagcctgggcaacatagcaagagatgtctctactaaaaaataaaaaataagccaggcatgatggtacgagcctgtagtcccagctactcgggaggctgaggtgtgaggatctcttgagctggagagatcgaggctgcagtgagctgtgatcacacaactgcactcctgcctgggcgacagagtgagactctgtctcaaattcataaattttttttttttgtaaaagaaaaagcgttcagcggccgcatatagactaaaatatcaattataacacattcaaaatgtcccctacactggcgaatgtttaatccataaggtttttttagtagtttgtcaaacagtgaccttctcacttcccagctgtaacacatagcaaaaccaattttcctacccttggctcagcaatctgggtctcaggattatttgtgcccaacaaaatctcttagccatttcttaaactactggcaggtagttagattttccacttgacattgctaagagattaaaattgtttatctcattgtcatacacaggccttttcagtttcctgctagcagattcaggttagataaggattacagaagtgatactcccaagttcctctctataacagtcgtcatcctttccccataatattatgaggtatattttattaaatctatcattcagatagctaacgcgtaagagcattatataacatataaaaagcattatacctcatgcataagcagaggcttagacaaacaccagctcctattcaactggggaagaagcacttcacaggagatcctgctgaattacacagtcagtcatcaattgccatagagaagttgaaaacaaattgagttgagcccggaaagaatgtcagtgaaattggaaaaaacacttgctgggaactgcctgggggtgcagtgacctcccttgtaattgcccaggtcccaccaactcagcagcataccaagagagatt[450 bp omitted]tgcctatgtttgagatgctgtatcatttcattttccctttccacccagaatcttaccacaaaagtaaaatgctagattaacaggatagcagtgagcttcacgaggaaggattcccttcagctgaaaattcaccaccaccaccccaggttacgtgagatgtttttctacttattcaaagatggggaaaaaaaacatctcctcccactccaagtgaaatcatacataaatatgaattgcagaggttcattctgcttccttattgtctatagctcctactttttgcttacttataaaacttaccagctgatgtggggcaaaatagaagtaaaaatctcagcaaataaaaaatgctgtattgactagtggcctgaagagataccttttgttgaatgggtttctactaagtgatatcaaatcaataaaatgcccaagtaaagctcaacagaggagaaaagatcagatttctaacagtgaattcttaatggagttgttgagaaacacgccagacaagttagtcaaaagcctgagtgttggcttgcctgtgaaatgattgtaacaagtcattccgtatcagacaaagttggaagaccctgcctttaagtaagaaacatcagagtggtcttccccgcacaaacactttgcaaacgtgtcgtggttgaccttgtcccttgaggctggtgtgcagtgtgcacttctgctgaccaagcaattcattcctatcgctttgagtctaagccttaaagtaatccccaaccctgcaactgaacaaaaggaaaccactactactacacccctactatgtaccaggtacagtgctaggcacttttataaacatgacataattgaacgctcaccactccatgaggtcacacttactctccccatttttcagagagcttgctagccatgtgtagactggaatttcacccaagtctcctaaacccaagcctagcacccttatccctgtggcagcagtcacaggaataagcaacaaacttgcattcccagggcttgattccctttctttgttcttcaccttccagatggttctgtatttcttttatgggtagataatgcagcagggattttttctctccttcattcattcacccattcctttaacaaatgctttaaaagcatgcactgtgttcaaagctgaggtggatctgcaaaggcgagtaaggagcttatccactgaggaagtttgttagttgaagggtgtaaccatgggtcctgtaatggtattgactattttccacccttgctttcctcctctgtaaaatgtggatattaaaggaaatgaggccaggcgcggtggctcacgcctgtaatcccagcactttgggaggccgagatgggagtatcacaagatcaagagatagagaccatcctggccaacatggtgaaaacccatttctactaaaaatacaaaaattatccgggcatggtggcatgcgcctgtagtcccagctattcggaaggctgaggcgggagaattgcttgaatccgggaggcagaggttgcagtgagccgatatcatgccactgcactccagcctgggtgacagagcgagactccacctcaaaaaaaaaaaaaaaaaaggaaatgagctctaaagcctgtcccagacccagatttcgatactgttaattatggaagctatcgaaaagtttttgttttgtttttgtttttgtttttgagacagagtcttgctctgtcacccaggctggagtgcaatggtgcaatctcggctcactgcaacctccaactcctgggttcaagtggttctcctgtctcagcctcctgagtagctgggattacaggtgtgtgccaccatgcccggctaactttcgtatttttagtagatttagtatttttagtagacgaggtttcaccatgttgactaggctggtttcgaactcctgacctcaggtgatccatccacctcagcctcccaaagtgctgggattacaggcatgaaccaccacacctggcctagtttttgttattttttaataggaagcacagaggcctaacttcctaatgagatcatatatatttatggtgtctgtcaaccaaggagacttgaactgtatttaagataatagtttactcctggaaaaatggatcagggctgctgtcttcaccagaaagttggggtgaatgaagggggcccagtgagaaaatgaagagctgtctggcagaactttagctagtcaaatttgactacaaggtcaagggaccaggtcagcagattcttccagatcaccaaggtagccctccacagtcagatggaccagacccatgggtctgaaggagatgctgattgtttctgctccatgttgtttgggactgcctgtagcaccatcgtcacttggtttggtaagttaacacaggaagggcaaccatcttagaactggtaatacaaaatcccaaacaggcagctgccactccacttttcaaattaccaaagagttcatagttgggtttggtgtgacttttgttaacaatgagctcccctgatggctgaaaaatacatctttcatgatgccaattctacccagtgaggaaaagaaaaatcacagcaaggccttgtcatggagttgagagtaccatatgcataaacctaccatcccaaggtctcctctcccaccaaaatccacagaaccttctaccctgaggctgcgatcacaacatgctttagaagacttcccaagttaattctgaaccacctcctgattatccaaagtctgtagttttttttccaccaagatataaaattctttccattaaataccttaaaattctacctttagataactaaattgagacctgacaaaataaaataagcctaaacaatgttgtcaatactcctaggaatataaataaactagccagtactaatctaatctggaactgcatttaacaggtatgtgccaacaaaatcagaaaagtgactctgtagcaattcagcacttaaaaacaaaaattctgaaaatgacttatgtaacacctcaaatatatttctctaaaaacaccgactgactggtttaatgttttcttgtagtacctaaaagcgggtgagtcttgagctgtatgttttgcaaagtctaagcatttgcatgataagtagcaacgcttagaatcaatctctctttgtctgtatacctcacctttacttgaaaatgttttaagctggctgaatacttttatctttgataagacaaggtctttgaagtgatgttttggctctgtgtgggcaaggcctcagtttctagacttcagtatctgaggggggacaatgccctgctttttgtttttaaacagaatgaatcttttactgttcaggttaatgttctggcatcctaccagctgtctctaccaccagactaattattaatgataatcttaggtatggtactgatgatttattttgatgatactttttcagtatgaaattacaaagagcctttcttatggcaaagagatagaagataggcagatcaatcaattggtctcaagcaaaagcacaaaagtaaaagtgcccagttttggcctcagtgccggaaacccacacctaagaagtcttgtcgcattttctgataccctaatacaaacactaggctttaaatcagatgtcttcaattacatagtcacagacagaactagatgaccccatgagatcattcccatacaatacccacattttcagaggagaaaactaagctagagaagcagagcccatgagtgtgtccttggttccctttgactttctgagtgtttatttcctcatccccaaacagatcagtcatacccagaacccaaaataaatgactcggggtcctcccagatctcaaagctgctgagcccttgccagaaagatcctctccatgtacctgagagaagaagggtaccccatcttcagaaaacagcatatgcaacctgagctcataaccccacaaatctgagctttcaacattctcatctagaaaagaattttccacttaaaagtattcaccaacagatgcattttttaaagtgcccctctaggcttttaaattttagtttggtttaccccaaactaaaatttttacacacttttcaaaaccacataaaaccatgttaaactgtttggattttttactatgtgtatgagttcgtttttcactcagaaaaaaaaaagacaacaaaactagtcaacatcaaaaaaaaaaaaaaaaaaagcgaaggaaacaaaattccaatggcctttaaaaaacagtaagcaccatgaagccaagggttttgtattacacttctttatacaccccacaggtaattaggccagtgttttttgtttttgttttttgttttgttttgaaacggagtctcactctgtagcccaggctgcagtgcagtggtacaatctcgcctcattgcaacctctacctccagtgttcaagcaattctcctgccttagcctcccaagtagctgggattacaggcgcccgcgaccacgccagctaatttttgtatttttagtagagacggggtttcaccatgttggccaggctggttttgaactcctgacctcaagtgatccacccgccttggcctccgaaagtgctgggattacaggcatgagccaccgtgcccagcgttcttttgttttttttttttttgtacatataactgacagaacaattttgaaataaatcaataaaaatctatttttaaagtaaggtacttttatatcttaatacaacattttaagcctggtgtctcaatggtccagattctcttaaacagaattatatagggaagtaaacaaccgctggttaatttttagttgtcagaaagaacaaaagattgagcactatccttgctcagtgcaatttgattttgttcagatctcagagaacagtaagcatgaatgtgcctgaatttcagccattgcacactgggcgtgtaatgcaactatttctgagcaaatttcaagtgtctgatccctactaagcagatatactgtcaccccctgcctgcacaccaagtcatacacactcattcctcagcaaggatgaagaaagcgccacaggaggcccgaaaggcttaactctgtgggaaggtagggcagcacagaaacaatctcagtgtctagtgtgggtctgagggccaggggttggttatgtgactggaacgctgaacatgccatttcagacctgtgtgagtggggtgagcaagggggaacctgtgtgagcataggagggtaagtgtgagcatgtgtgagggcatgtgtgagggcaagtgtaagcaagtgtgagcaagcatgagagtgtgcagctatagcgttgtgcagtagctggacagacacagcaaagtccagaaaagagaatgctacatcagtttggtagaacctcagacagagctggtggggcttttatctatcaaacacagaaaggcccagccaaaagactcactccatcaagatgtctggccttctgtagacaaaatatctattgcaggtaatcaagtgatttttgacccaatgagctgatgtttgggtgtcacagataaggctccagcgtaacaatctgtacaagaagaaaactttgcttatcgtgcaagcactcaaccaaagctcaaaagtccctaggatcccataatttccagttggttacccacccttacccccctacacacacacacacacacccaccccacttcccaccagtctcatgtgattcagagagcaaagccggcaggggatttttccctggctctgctctgcgggtgtctgaaaacctgtttaaaggtgggaggtagactggacaacaggctggcctcgtttctacctctggatatgttcactaacttaaaaacaccacttaaccctctggtttctcaaatggcatcgttctggcaaatggaaaaaaaagtcacctgtcgttattgatctccctgttaattctcttctagacaagagccgttttcaaacatcgggacacaaactgttttgacaaccagccaatagaagttgctaatctaccactagaaagggtgaatggacagtcagggaacaagttaaagtgactttggctgtttcagctatgcttcaggagttcaaaagcaactgggagggatgggacgggggaccatctcttattcagtagacctctaactgctgggcagaaagagaaatctggcccatgccttcagaaagaagtatttcccacctgcccttgaccaccatccccttccaggtggaccgcttccccctctaaaggtggtgcgcctatgcctgacagcaggtgcataatgcccaggggccctgtcctagccacaaaatgccaggctgattggggcgattttgcatacacatttgcctccagatcatcagcaaaaagcagagtttcatgaaaaggaatgcctggtcttcaaaaatccagactgtgattcgtgaatagggaatcagagaggagtatgttttgtggtccaaaataccttagtgaagaatgcagagtagaaacataaagctcccagtcgtggtggagaaagttattgaggtacagtgaagagtatttgatattcaagatgaaatcggaaggctacctactataataaaatgcagactttcccccaatatagcacaaccacccctggcacactgaactaggaaattccccatgctctctggaaaagctaagagaaagcccagaccttttcagaagtgctagcttcaactcctatgtcttctgtaagatactctgatcctcctaagagtaaaagcagcctacaagttcgattaaccatgtaatagaaataaactcctgtctactgccataaccagaacaagatgtcagtgtgatgacccaaaccagaggcacgtgaaaacatacctgaaatgtcaacctgtaccaactgacatgtacatccattaggaggtacctactccggagataacactcaggtgcctatgatactgaagaaaccatctgcttagctcaaagtatggttttcatttaattcatacatcaaactgcaccttggttacactgaccacacaaatattgcaatggtctggcttaacttactgaggctcagtgattcctcacccagttgactggccacaaccacatctacaggtttcagggtcctgtcatagattcacatcactcattttcctggcttattagtagaggctaacttaatttgatgatatccttgtcaattttctttggcctgaatgaaacacagagttaagtgtttcacctgatcagacaaaaactacactcagtagctcagttcactatctttggggattagtccagaagtttttggtgacatttatgaatattattttcccaagaagcgtggtgacctacatgaaatacttttaaaacttgttttttaagatatgcatggaaatagtagaaagactcagattcactgtccaagctaaaatgcatggtcagtgcctctgcttccacctcagcaaacacacctggacagaattattcactgtgactgtcccagggccctggtctgagttttcatgactgtgtagaaagttaagaaaaagggatgcatagggcatcaaaagtctgctgaaatcagcatgagttctgggcaaatctcagagcaagacttaccactctaggtttctgctggtccagggtatgcaggaaggctgagttggggtccagggtgcgctcagggtcactggagatgtcctcctctgagtcttcgtaggatgaggagaagcccgtggaggaggccgaggaagaggacagtttcctcaggggcaggttgccccgagggcttccctgcgtctcctccaaggccccatcctcctgggtgcccatgtctgtaatgatgacagcaggtatgttgctggggctgcaggccttcctcaggaaaggcttgtccggatcttggggtagcagctccggacttgggagggcatcactgtcctgccgctggctttcccaagtcccctctgattgcacccctgtgccacgcgtccaagccaaaccggctttctccatggtgccctgccaaaccctggagttcccaggctgcacacccaccctgtccccaggagggcactgaggttctttcagatctttcgcagcgtcccaacagggcaaaggctccagcattctgccagaaggaattcccgcctccacattcccggtccccggctgtgctgaggggctgcccccaagcaagcccagcgttggggaccctccctccactctgtcggagagctgccaacgccccccgcccacgggggccccacttcgggcctcctcagggcctacggaggccagggccctgggcagcctggaccagctcagggaatcagaggactctgcgctttgcacgctcacagtcgtctcctctggccttttgcccacttcaggctccccagagcccggcatgccacagggcagatatcctttccccatcttcccagggggttctccatcgcggggcccgcccctttctggggctgggcttgtctcactgcccagaaactgcccctgcctctccaccagggcctctgggggctgcaggtcctcaagctcacgggctctcccagacggctcagtgagggcaagatcctgtggacggtgtggcccagtggatgtaactctcgctgccacttccgtggccatcgttaagctagctccgaacagccccaatgagggagctaggcagctccgagttcccggggtaggagagccccttttgtcaatttccatagctgtgggtgagccacagcggggactggcagggatacccttctccatccttacaaaagcggatggaccctgagcctctgatcctgtaggggcagcccggccgggaagaggtggcattcctttcttcacctgcgaggagcataggctgggccctcctttcctcccggagtcggttcctgaagtctctggacattgctccccccaggactttgtcctccgttcctcgctccgggcgccctgaaccaggacccttccagggggctgactgctgctgcggaaggggcacggggagggcgagcgagccctgcccaaacgcgggctgcggggcgcttgaatggcggagctctgtgcctggatgtgcgcctcaaacatgcccactttctggttcacctgcacgttctgcaactcgcgctgcaagatccgcagcttcctcttggcctcctccggccctggcggggagagggtaccggctgccaccacctgctgccggtcccctcgcaggcgaccagcccaacttgggctgctcacgctactgccgctgctgccgctgccactgccgctgctactattcagcctgcgccggccgctccgccagcccccggggctccggggctcctcgggggacagcgactcggctggggggaagaggaaagaggcgcctctcccggggctgaaaacgctgccggggctcagcactgccctcctcgggggcgggggcgtctcgctgccactgggccccgggccgccgccgctcttcatctcgttggcgctattcatgatcaccaggctattgagcgcatagcagtacacagccatagtactgggtcccgcgctgcccgccgccgcggctcccgctcctgctccgccgccggcgcctcctcctcccggcgctcccggctcagccccggaggcccggcagccgcggctccgcgcgcagatggggcggcatggcctgggcagcgggctgggggcacgaccgcgggctcagcccccgcccaaagctccataaacaaccgtgcggctgtggagatacaaggagaaaagtcaggaccctggagggcgcgcggggggagttgggggtcgcctgcagaacccagagagagccccgggaacacaatctatccgggacccagcgccaccggacatctcacctatggggacggcgaggctcggcgagggcatgccccggctgcctcggtcgccagcgcggtttcgggtgtgcttccccgccccccacctcgccccaggctgcgatgcgctttatgaggtcccttcaaatcccaatcctaatactcgtctcgcggaccggcgagaagcgaggtccaagtccttggctcctaagtatgctgtgtgcggggcgcggctgactcagctctcccgggctgaggacaccccagccaccgtctccgggtctccccagcctgagcaaacattggctatccagggcaacccggcagccctcgccctgggcttcagggtctccctgctccaccctctcggggcatcagagaccgaccggctcggagggaacctaagcgggacctgccttgcccgagccgctgccagcgcccggatctgggagggcgcccgcgtgcccgccgtttaccttcctgaccctagccttggggctgtgtctctcggcctacgaaggcctgggcgggcagcggggccgcagccgaagcatttttcagggctagccttgtcgcctatccctagacaagtgttttgtgagtgtgggcgcaccgaggttctacacgttctctttaccggaaccagtacttgctgcccccctgccgtcgtcccctatgggggggtgtctgtgagtgtgtgtgtatacacgcgtgtgtgtatacgccgcacgcgcgcggagcgagtccgctctcagcgcgccctgttgccgaggacgcgactgcccctgcgggctcccggacccgcgcccactcggaggaacttaggggcgtgcatggctgcagccgggcagcagccctaggtgcacagagcctctagctctgcaaacctcccaggagccggcgctctaacaccccagggcagcgccgcggagcgcagggcttctccgcatcccgggcagcctcgcccggcgccagcagagccgccccgagaccccagcctggggactcctggagcgcgctgagggaggcggcgcggagtgagcggcccggaaggcgggtaggagaaatgcggagacctcgtctctccctattttctccccaccgccactccatgtcaccctccaaaatcaaacccccttccctgcctccccagcccacccctttgccctgtttcggaaccaggaacgccgagattcgctccagagcagaaagtgagggaaaagagggttgttcagaggcgagagccattaaaaggccgccaaacttacctgcagtttctcagattctcaggtcctgtgtagactacatgcccagaggcgcaaacctcgtagggacgagatggctttaaaagtaaaaatgctcagaaattattttctcacaagctatggaagacaaaaaagaggagtgcgaaagaggggggaaagctcttcggttcaggggcccggcgatcccggcagtggcgacgccaagccggccctgcacgcccttttcgaccgtggagatactgcccctgtcagtgtctgctccgggctacttcagtgtttgttcaatgcacgattaaaaaaaaaaaaaagaaagaaagaaaagttgttgggggggggggtagtggaggagggaggagggagaaaggcggaggcttgggggaggaaagcaggaaggaagttgtgagcctgtctggggttgaactcagcggaacaagtttttcttttcttcttttttttttttttctattgcttggcaagacgagggagggaaacacttaaaaaaaagtttccattgttagctaacaacaacaaaaaaggcttttaacttctgcggtttaaagatatacaattcattttccacccctcaatcgaggcttgctgatgtgtctagctttatgaaactatttttgaaaaatgtttttaataaagttttgagtgtatgtcttaaacaaagcaaatcatggggacctttttagcatttaaaaaaggctacaatcctgtataaacagtttgtgttcttgtacacagttctgcaaattcaaagaaggtacattgaggtcaccttcctgcagagttgcaggttttaagtgcatcacagtagtattttggaagactggttggtctatgagctggggatggttttgcagtgcaattggtagatatataaatacacctttacatgtcacatttatttataaatgcacacggcacatgtgacattcgcatatttttgcacttaattctcagaattattttaagaaaaagcatagtcctgaaactaagaaggcttgggtaacgtctgaaacccctcttgctcctgtagacccttgtagactgtctcctgtagactggatcattttcaagaaactttctcccctactatcagcaaaaaagggagaaagaacatcagccaacattactgggcaggggatcctaccccttctaagccctggcactgccagtgtgttttacataattctctaaatcttaaactacagcatttagtgaaaggagggaaaacacagctgcacggctcaggagactgaaacatccaaagcctgaattggtccttatatcatgattagctgaaattcagatggaaattttgactttacttgtagcacacagatctcttgcttgtttatgtaacaatactgttaagtgagcaaagcaacctgctgctccatcaggaagaggctcatgctaaatctgaaatcaagagatcttctagccaagaatacctgagaatcacacactgttgaaaactttataatttttaaaaattagaaatggaagaattgaacctaattaccctcctaccctcaatggggcttttttaaaaaaaagcccaatcccagaactttgggaggccaaggcaggcagatcacaaggtcaggagttcgagaccagcctaaccaa

SEQ ID NO: 289 - DNA, 177392 bp, Homo sapiens
  source 1..177392: mol_type = genomic DNA
tttctggtaattgcacttagtttcctggcattcaggtctctgcccccttgggccttcaaagtgccagagctgggacatggatgtggttccaagtttgacaaaatccccatcgtccctgcagagtccttacggcttgggctggccaggacccagccgtgcgtccaaaggcttccccttaaagctattgtcaaatatacataaattctgtttgcagtctctggactttgagtagcttgtttcgctgttgaatttggtttgagtggggttggggttgccgtagggactcagtttattccataaattctttttctatcctgtaagattaaaacataatttgaaatgacacaggaaccaagggttaaaatggccggaggatcccttggctttatctgccccttgcccccactgctgtcataaacaccccagctgagccctgagggaccttccccccacaatccaggagaagcagcagcagcaggatcagatcccccatcccccaacacccacccacccctgtggccacccccacctctgctcagatgggactgagtgtcagctgtcctctaagacctgagatccttcctttactcagtccataaacattgaatgaatatcgaccatgtgtccagcactgtcccagacacttgggtacagaaggtaccagaccaaagcccttgtggactggggtcagcctcagggacgcctatgaggacatcaggcagggccctggcctgggagctcagcctaaggggtccaggtagctagtgggtgctgcaggcatccccagaatccagggggccctcagcctgggctggattcaaagacagaactctagagtctaggggtcctggcagccccctgctctgaaatggtcactctcagggagaatgtgcaagtgtccaggtgtctaaggtgggagctgggtcctggggacacacagggctcagtggtcagaggaggaccagacgctgacatggccttgttccagaggtccctgagcatggcacaggagtcaaaacccagcacaggacaggggtgtgacggggagggagctgagtggcttcttacacaggctccctgggcactttgcacgtaagtggtagtctaggctcaggagccgtttctccagcaacctcctgctcctgtagccctcggccctggaagccaaagaccctggaccctacagaggacttactggtccacacagcaacagagagcaccagggactgaagccagactggagagaacctttggaataaaacacagtccccctttgtggatgaaactccacagaggagtttcttattcacagtgagcgtccctgatccccctcctcagggcgggtctccccccatgacccagacccatgagttaaagcatccagcacaaggccaccttccacggtgcctcatctctcaaggaacttgacagtcagggactgggaggactcctcctgttttagaaaatcatcattttcatctgcgaaaaggaaaggataccaacccgagttcttggctcactgaagtcatcaaggccacagaatgaatgctagtgagaaaaacaaaaaaaggaacaaaaactataaaataataccaaaagaaaatgaggaaaagagaagaaaaagaaaagaaaacagatgtaagatatgtagtatggaactcaatgacagcattttacaagaactaggacactgagttgttgggttcggaaagagaaatgggaagtaaacaggctttaggaagtgatctcccctgggaaacgcatcctggggtcttccacactcagggtgggttatcccgacccactctccaaacatgcagctaactcattcaggggagattgacactctggaccgggacaggactttttggtgctgtgatgtggccttcatgcagaacttgggcaggccggtataaatagaggaaggcccagccgatggtcatggtcagcggctcccaccaagagacgggggcgtgatgtgtgcaccgaagatcagggtaaattccactcaaggtcacccagtccaacttgcagacaagtagagcccttctgcctacaccacgcttgcccaaccctctacccacaggccccatgtggcccacggcagctttgaatgtggcccgacacaaatgtaaactttcttaaaacattatggaatttctttgcatttttttttttttttttttttagctcaccagctattgttagtgttagtgtaatttatgtgtggcccaagacaattcttccaatgtggcccagggaagtcaaaggattgggcaccccagccctacaccatctttaccagggttctttcttccaagagagtcgctatttaaaatcttttgtgccatttgattagtctacttatacagagaaaaaaaaaatcagggaaagacggtcttaacgggaggaaaaattaaacacaccgactcaaaagtagaatttttttcttacccttctcaggacttgctttgttcaaaaggagttgcaagtcattaggggaaacatatctgaacatcaactggggcttttgaaaataatccttgagttcttctcccccccaaaacaaggtaatatctccctatattatttattggaaaagtccaaactaacagccatcaacttctaaacgaggtgtaggatcattggaagtcagagctagaaggggccttgaaagtcacccagcccttcatcttccacatggggaaactgaggcctgggaagagggaaggattcgttaagaccatccagtgggggtgtggcaggaaagagtttctggcaatgacgaagggaccaaggggccagggatagtggtggctggagctatttccacggtcacaggccccgatgcctgtaaggaaatgaaggtggcatgaggcatcttggaaggtttccagccctacaggcctcgtcaggcatccatcctggccagttcctcctgctctgcatgccagcttccgcaactcccttctgtggcaaaaggagacagaccagtccccaaacataggctttgagaaaagagtcgaaaaaagagccagaaagacgattccaacatttcccaggtattctcactgccgaggacatagtgagtgttattttaagtgtgcgctcattccacctgacttttaacattttaatcagcaaggatgaccttgggcatgttttaagcctttcttttatcatatctggctctgtgactcattttaccaacacaagtggtagagctacctgggagatgggaagaaccggtgctgccagtccacacgccttgcctgggccctgggctgcgaactttcatatccccaacctcattttatccctacatccaccctcagagacagagcaccattcctagcagcacatgagaacaccaaggcctgaggcagaggggtgaattccgtggggcagaggggtgaatttcccaggctctctgggcctacctgggcaaggccagaggagagcccaggctcatctatctgcgaaaccagctcatccctcaagcaattcttaaatccaattatacttgagacccccttgggttctcagaatatccttgggaggctggtaggcgtgggcatctggcagacggggactctaggaatcagctaaaactggggttcccatgagagcaacaagggaactggcaggcaagccctgcccccgcccctgcgcacagatcctcggtccacttgcgacccggcagggccctacacctccagcagagatgggaaggtgatttcatctgcatggagccgactgtcatgagagaagggagaggaagcatctgaaacggaggtggaatcttaagtgctgtcccatctctctgggcacatggtttgattccctactggactggaaaggctgtcatcccatttttggacagccctggaatctgccttccagagatttctgccctggtttgtccctgaaataagtcagcttcctctctcacaagaccggcctcagacacataaagcccagagatgccccttctacctcctcttcccagggctgatcccacagtgtcctttgagattcaggtgggaccccctcttcgagcacaggcatgccggccacggacctcctggatgggttcagcggctctccatcttgttgccacacttgaacttacctctgtgacattaaataggcaattattgtttttctgtactcatctagaatcatttgcgtactcatccacaaacatttgatgataccctatcctgtggcaagaactgtcttgaatgaagagatgcacaccacgtggtccctgtcctcaaggactcacagccatccggtggaagaagatgaagggcaataccatgataaaactgctttgtgtgtgtcctgagccagactcatgtgtctgcctggaccaatgtcatatggaggggcaggatgggatggctatgacatccatggagaacccagccatcccttcctagctgtgggaccatggacaggtgtcctaatctatctctgcctcactttcctcactcataaaatgggcatcatggtaaatgggctggtggaacatacccaaagcccattgagaggccagcctcacgtcttctgggatgggagaggctgcgtcttccaggaacatgcgactggtctggggctcatagaaggtatttaaaaagtgaatgagtccatggaggagaacctgtgtctgtggttagggggatgccactgacctcatcgggctaatgtgcttcacctctttcctagtgagacagcaggggagggattcaggggaaagtcttttgtgaaaaagacacacagagttggccccggcctgaagaatttttgacagccattgagaaggaaatgcctttaccagaaaggaattttgaggaactagcgatttccatgagatgctgatttaggggaagaagggcagagaaaggagggctggagacagagtctatgctttggaccttatgaaataaaatgattccgcactaacatttcatggaaagaaacctggggacagtctgagctgcagtcacctaccttttcctccagttctttcaggtgccgcttctgaaactccagtttgtcctccagttctcggattctctgaaatacaccaggttacgtgtcagaaaaagtaagttttccaggtttaaaaactctgtttttattttttattgtggtctagcacagaagctgtaaaggataccaacactgtgggcagcctgatgagctctgatacatgcacaagcccatgtcaccaccgcccaaagcaagacagagagcatcccagctcccaggaggccttggtcccccggctcaattccagctctgcaaaggaattctgttctgacttctatcactaataatggatcgtgcctgttctagaagtttctggaaatagaattacacagtacacattcttaagaggggatcttttaaaaacaaaacatcgagactggaccaaaacatgtaggcaccctgagcagctaataaaggtcatgggtgggatgtgacaccacatcacgtacttgtctaagatttgtttaactgcagcctgggggatggggggagggagggagaagggcagaggaggtcaatgctggtgggagccactgcaccagcatccgccctgccctcttagaaccccactcagcacgtggtaccagggtgaccgacagacccggtttgcccaggactttcctggtgtgagcctcaggaaacccctcagtcctgggcaaacccagactcttagttaccctccttggcaccgcacctgcagaattaattccctgggtggtttaccgatcattccttcccatcccacacagcgtctccaccgagggaatctggtgaactcccccgtttccagatcttcatgtgctcacagggcttccgccccatcaagggccccaccaaggtgggtacccctggggcaactctgcccagcgggctgctggcccttgtctgccctgaacgggatagagacctcatacaatgagacaatgctgggaggcggaagggtggacgatttcagccagcaaaaattaaacatggggtcaccataggcctttattcaggcccagagaagccatctcacattccgtagggcagtgattctccagcctgtgtcagcatcacccagagagcctactcaaatgcagattgccaggccctgcccacagagcttctgcctcagcccagctggggtgggacctgagtgaaagttgcactccagcatgctcccaggtgatgaggacgcagacggtccggggcccctgctttgagaaccaccactgtgggcacatttagtcactcagtaaataggactccatatgcctgggcctgttccagtcctggagagaaagacaaagtccctccccttatagttcaattaccgttcagacaatagcagcatacacataaatagaaggggcatcagatgaatacaaacaccatcaagaaaaccaagaggggctgggcacggtggctcaagcctgtaatcccagcacttttggaggccgaggcaggtggatcaccggaggtcaggagttcaagaccagcctgaccaacatggtgaaatgtctctactaaaaatacaaaaatgagccgggcttggtggtgcgctcctgtagggaggctgagacaggagaattgcttgaacctgggaggtggaggttgcggtgagctgagatcgcgccattgcactccagcctgggtgacacagagagactccatctcaataaataaataaagaggcatgaggaggggtgaggtatcgtgccgtgggctggaggagacgtggaacccagcagggttagttcaccagatgcacaagaggggaaaggaattccaggcagagggaacggcatgtgcaggaggccaagaggcctttggtggggggtcggggacagagctcagagggtctggaatggcccatgtcccgatgaggtgctcacagctttggggttgccatggggagccagtgacgggttctaagcagggaaatgatgagcttttgatttcaggatgatcacggggcagccaaacagaatggattccacgaaggagacagaaaaaaagatgattctctcagatctgtgaccttgggcagttattctgcctccctgaggcttggtgtccttatctatagatgggtgctgcccacatctaaggatttaacaagcaaatttgtaccaagtgtttagagcagagcttggcattgagcactccatatgttatttttttaaactgataattttctactctctcccacccgaagggaactgtgtgacctcagtctggtagtggcaggagtttcctggcaaccccctcacatgcagggcggccgagtgctgctgagtaagcagggcatgtggcctgaacccggcttgaattctgggccccaaatgtagcagctgttgggctctgggtgagtgacatgatctctctgtgtctggacccctctgctgtaatgtctgtgtgggaccccatgacaccgagggtgaaatgggatctgcaggacaatgctttgtaatctaatgtctggctttacagcttccaaagaacatctgagaatcccccaggaacaacttctgggctttaaaaatcagcctgacaacctggttctcattctgatctttcttgatattcacgcttaggaaacagtctctcatcagagtgtgggaggccagaaagagcagtgggtaagagtttcctcatctgatgacctgggttcacagttgagctctgttgcttcctggctgtgtgaccttggacaagttgcttaccttctctgagcctcactctgctcccctgtgaaaaatggcatcaatgacctgtcctcaaaggactcgtgtgagtttcattcaaccaatgtccactgagccccttctgtgggtcagccccagtctgcctccctgggctggaatattgccacagcacctagaacagtgcttggtacacgaatgttagaacaacacaacacaaaacaaaacaaaacaaaacaaaacaaaacaaaacaaagcaaaacacagctccatgacggccagcaggggcaactctgagagaggtggacaatgcagctgtggcagttggaaggggctctagagggcttcgaaggtcagactaagcaacccagactttgtactctgggcaccagggagccagtgagggtctcagcgggaggcgggggtgctgtggtggtgctctgtgttaggaaggcttcggcagagaaagagacaatggagagggcattgccatcgtgaattgtcccagcagatgtctctgcaggccaactgtggctaggaagcgaaaccagtgctactgaaccctcagagagggtcaggacaaagtgaatttacaccagtggcttcactccaaccttcactcaggcagaaccttttacaaaagtgcagaatcattccgctgggaaaggtgccattcactaatggatgttttcacatcctcttctcctcttagttaacagggctggaaaatgccaatttcagctggggctgggcaggggacatcactgcaccctgtgggccagattccaggtgaaatacaatggtaatgtccacagcaaactgggagactgggagggtctgtccatggttgaagcgggtagctagtgcttgggccagatcagaagtggggtgagtgttgccagagcacctggttgtgttaggtagtgtcgcccgtgttgaatacatgagtgttagggattatgatgaatataaaggtgagagaagacatgataatgattaggttgggttagaaaagccaagtgcagcaaatgttagctaatattcattgagtgcttactttgtgagcactttagataaattctccattgaccgcaacacttcaagttgtgtgtgttgattgtacccattctacagacaagaaaattgaggctcacggaggtgaactaacttgcctcaggtcacaccataactaggggcaggatttgaataaaaacctgtctgacccgagagcctatggctcctaatgctgcatcatagctttccatatataaactttaaaacgttaatttttatgttcctggaggggaaaaaaatcactgtaatgcaggtttgaattccttctctttgggaaaaaaaaatgtaggttttgcaatactcttttgaaaataccagatttctggagactatcaaatgatagcaactagcaaagaatcacaaaacatcaatagttaaccctcaggggatcatgcagtgtggagaccagggctctggcagtggactcaggatgggcctggcctggaagggtcactttgtggctagctgaccttcatccagctgttttgtctctgtgccttcatctctccctctgtttaagctggtttgaagacttaatcaggtagccaaacacctgttttcaaacaggtgttttagtgaggctcattacaaccactgttccagggtggtggtttctctgtaaaatcctatatacagggtactacttttgaatccatagtggtctgcacttattgacagcagtttacaagtaataattatctaaaccttaccatgccccagtgagacaggcattgtcatcatccccatgaggaagacagtgaggcccagagaggttaaataatttgtccaaggccacacaactaaatgggggatccagagttcagagcccggccgtctggtcccagtgtctgtgttttcagcttctttgctgcctaagctgaaccacaccatgctgctctgctgcccagaatgccctttccctttgatggtgatgatgattgattttatgttaacttggctaggccatggtacccagatatttggtcaaatattctagatgttgatgggcacggtggctcactcttataatcacagcactttgggaggcctaggtgggtggatcacttgaggtcaggagtttgagaccagcctggccaacatggagaaacgccgtctctactaagaatacaaaaattagctgggtgtggtggcgggtgcctataatctcagctactcaggtggctgaggcaagagaattgcttgacctgggaggcagaggttgcagggagctgagatcgtcccactacactccagcctgggtgataaagtgagactccatttcaaaaaacaaacaaacaaacaaactagatgtttctgtggaggtctttcttagatgagataaacacctaaatcagtagactttgagtaaagcagatgagcctccataatgtgtgtgtgtggttcattcaatcacctgaaggccttgagaaaaagactgagctccccgaggagaggagcatgctgctagcagatggccttcaggcttgaaatacaacaactcttccctggggctctagcctgccctccagattgtgaacttgccgatctttatctacagttgcgtgaggcagttccttaaagtaagtcaacctctttctctctctctctctctttctctttctctctctctctgcccgcatcccccttcttttttccttctgtgacatccctccccactggtaatctagatccttactatctgggtgaccttcagacacatgagttaacctccctgagcctcagttctctcgtctggaaaatggacgtcatagtgcctacccatagggtccatgagataaaggatctgcagcgcagggagccactgcccgacacatggtgagcgcccgacaaatgctctgcatgatgctgctgcttctttcccttcctcgtcaatcaggagtcatgaagccctcagctccccatgtgctcagtagcacatgaaactcacacgcaacatcgaaccttggaagacattgaggttttcagacctacaactggtacagcttctaggcccaatgctccaatgagccgccatcacaaaaggtagcaaaaaagcaaaccattcagcggatgcctccccgtaaccagcatctgacctggaaacagcgtgcagatgctggagaaggagggccgagggagaaggcactttggtttggatgaatgtttcagcgtttgctctttagaatgcccaagtgccccacgtcttgccccgtcacggggagatatgatgggcatctatgaaatcttgcttcttggaaacttgctttaccaccaactctccctggaatgagcctggggcactcagaggcccatcagggtgccaaggtgcacacaggacaacaagggtgccggggtgctgtgggcacagccgctgttgccgcctacctgctgggcctgctgcagcagctccatgcgctcccgcaggatctggctgtcgaactcgcggctctgcctgaggatctgcctgcgcaccttttccacagcagcctgcaggtcctcccgctggccctcgctcagcgcctcaccggccctccgccccggctcctgctgcagcgctgtgtacagtgtggcctccaggtcttggattttctgaggaccccagatcacacagacagaggaaggtcacaaggaggtggacaggaaccaccagaaggctgctgccagtggaggcagagccagggaggggggtttcgggcagggaggggcaactggcaggggccaagcacagggccagcagtgcccgggggagcaggctgtgagggagcaactcggccccgcacacttgtcattttttactctattcaacccagatgcccctactatgcacaagaggggacaaaggcaagaagaaaaagtaatcatagcattcccttaagatgcatgactcaaacagaggtgcaattcacctgggttttattccatccttggtttccaattggctctcctcaccctggaaacaaatctccccttttctaatgggtgccaatggggaaatatgtctggatttgcacacatttggttttcagctgccttaagaatgcaactctagcccaaagcaaatagtggcaatgttttaattgcccctaacccccaacaaaagcaagccaccctttttggcaaagctgaatgaggcattagtgaccaactggggatccttgtgaaagctgagttgtcatcattacaggatgttactcgttttcacagcaagacacttaaatgtagctatcttatggcaatgtctaaggacaaaagacaattacctccttttctgccttcctaaatctccacccacattccttactaaggagcagctacttctctcccaaagaaactacaggtggtatagagaaaccatgagtttcaatagaaacatggtactgaggcagaggttaaccattagccctccatcaccgaggtagaggctaaccggtatccctccatcaccgaggcagaggctaaccagtatccctccatcactgaggcagaggttaacccagtagccctccatcactgaggcagaggctaaccggtatccctccatcactgagtcagaggttaacccagtagccctccatcactgaggcagaggctaaccggtatccctccatcactgagtcagaggttaacccagtagccctccatcaccgaggcagaggctaaccagtagccctccatcaccgaggcagaggttaacccagtagccctccatcactgaggcagaggctaaccggtatccctccatcactgagtcagaggttaacccagtagccctccaacaccaaggcagaggctaaccagtatccctccatcaccgaggcagaggttaacccagtagccctccatcaccgaggcagaggctaaccagtatccctccatcaccgaggcagaggttaacccagtagccctccatcactgaggcagaggttaacccagtagccctccatcactgaggcagaggctaaccggtatccctccatcactgagtcagaggttaacccagtagccctccaacaccgaggcagaggctaaccggtatccctccatcaccgaggcagaggataacccagtagccctccatcaccgaggcagaggctaaccggtatccctccatcaccgaggcagaggttaacccagtagccctccatcaccgaggcagaggctaaccggtagccctccatcactgagtcagaggttaacccagtagccctccatcaccgaggcagaggctaactggtagccctccatcactgagtcagaggttaacccagtagccctccatcaccgaggcagaggctaaccggtagccctccatcaccgaggcagaggctaaccagtatccctccatcactgaggcagaggttaacccagtagccctccatcactgaggcagaggctaaccggtatccctccatcactgagtcagaggttaacccagtagccctccatcaccgaggcagaggctaaccagtagccctccatcactgaggcagaggttaacccagtagccctccaacaccaaggcagaggctaaccagtatccctccatcaccgaggcagaggttaacccagtagccctccatcactgaggcagaggttaacccagtagccctccatcactgaggcagaggctaaccggtatccctccatcactgagtcagaggttaacccagtagccctccatcaccgaggcagaggctaaccagtagccctccatcaccgaggcagaggttaacccagtagccctccaacaccgaggcagaggctaaccggtatccctccatcaccgaggcagaggttaacccagtagccctccatcactgaggcagaggttaacccagtagccctccgtcactgaggcagaggctaacccaatagccctctgtcaccgaggtaaaggctaacccagtagccctccatcaccgaggcagaggctaaccggtatccctccatcactgaggcagaggttaacccagtagccctccatcactgaggcagaggctaaccggtatccctccatcaccgaggaagaggctaacccagtagccctccgtcaccatcaggccacttgctcttcaagtctcctctggcttctccctgctgggatccaggcccatcaggccagactgattttaaccaacaaacatgatcaccttcagctctacccaccccaacagttgcccttggggaactagaaggctggaatctgttccctggcagagctgcggggcccccaggtgggctccacatggagcagagcttgctggtgcctgcaggctcaccccttctctactcagcagccgagctcccaggagacccctgcgtggccagtttccagatagaaacgcaccactcgattctggaaatcccgttgtgggcctgccccgcctcactcagctcagtgacaaagggacacaggcttgcatctggcatctgctgtcctggccccagcatggacacatggccctgtcaccctctcagagcatttcacttcctgactgttcatgagaatccaggggctgcgtcagaactcctgtctacccatgcaactgaaatcccactgggagcacagtgcccatggcaggctttcaaacactccaagtgtgaaggtagcttctgtatggtggcagaaccagcatgcaggggcctcttctgcagattcagcattcttaggggcccctcaggccttcctgagttggtgcttagacaaaggaagggtggaccccaaggtgttccgaagtgtgttttgggaaatgccagttctgcaagatgtcccttgaaaaaaggtccagtgattcactgaacttggcacaccacttgcttacattcctctcggagcctcaactcaccctttagcacgctaagaccccaagaagtccttcagagttttccaactttattgcgctacgctttgcgggaccctaagttccatctaaaatcacattccttggagtttttttggaaaacactagggaagaacagggatgcatgacggggatggcccagcctgcagggtgttttcaaaagcaccaagcctggaccaaaacacgaatggagaatgtctccattcgttagttgccctcaacactactgaaatgtcgtgtaaccagaaacgatagcccagagggaaatgctgtgtcttgataaggtttagttcattctgatcttctacatctcctgctcctagtctcaagggattcaagcctcacagcctcgacaggaagggacaagggtcatagctagttgcaccggccttcatgtctaaatctcctgtccatttgagctaagcccatgctacctgctctctgtcttcctggagcctgtcatgggaagtagagttttaaagtcattttttttttagtgattggctctgcattttgtaggtgcaaacccatttttgtaaaattattttaactacaaatgatctgggcagagatttgctcaagactctgtaccacgctagcttcttcctacaaggaatgacattgaactctaaattctctctcctgcagcgacaagtttctatgatcttactcaactcccctccaccccgaaggagaatttctctcgtgccaggagcacttagctttgagtgtgaggacacaggagtttgaacatcatcccactgtattttaatcaccaggacgcccagaatcaattttgcaacccaaatgcagtattacatccgaccttatacctcgtcccttcggttctgaaaatcacctggcttcatctaattgctttacctctgcgttcctttgtgatcatctctttttcctatttataggaaaacttgctttgggactttaagtctaaatatttaagtaaaatcaaacataaaagaaatatagtttcttctcattcatctcaaatgattactagaatttaagaagcatgtctaagaaaaccattaaagtaactttgaatatttttgaaaatcacgattgatttggaaaaagggacagtctgtacggtcattccagtcacaaggtggagatggcatttttatcactcctgtttggcactggggagcgccctaaatgcagtttcagccccagaggaaaaagcagcctctaatgtggagtctaagaagccaaagtgtcaaacccacttctggtcctaccaggtaagcctggtcaagggcttgcttccggtagtcgagctcctcttccaggtagcccttctgcctgctgaacaggtcctgagaaagagggaggcgccatcagggaccagcgtcagaacaggaatccatgacagcttcagagcccgtttgctagagagtggcagtctcaccgaattgggggcactcagatgagaagggacttggtggtcttccccgtttgcccccacatgaatcacccagcaggagcctcactgacctggggcacccttgacagccacacctggatccttggtgaagactatcccattcctcctgcttccctgcctcttgggtacctgactgtaaagaagggacccacctcaaaccaaggcgcaagtcacaggagtccttctaggttcctcctgctacatcctagtggcccctgaagactgtcttcatggttcccagatgtggctcttccttcctgcctgaattgcatcacccacctcccgattggtctcactgagcacacttctccctgcctcccacatacctgggtcactgtctaagaccctgcaagcatgatctctccggagtgcaaatctctttttatgactgatttgagggtttcagggttagaattcatctcctgtagccacttccttttatagacaaggaaggaaagagccagggaggaccagagccttgccttagatgccacagttcagtgatggcagaggtgggagtagaaacccaggccttctggcatcagtcagggctcttgccacaccacaccctgctcctaggccacactagtccttccaccttcctccttctcctcccatttccatttctccttggagaactcgaattggcctttgactactcaagaaccacgtcttctgggaagccttctctgtcctccccaggctccccatacatccatagtcccagtgaataaccaccaccaccatttgtcaggtacccaaggtgccaagcacagtgcaaccctggttatgtatgtagcatttctcatcccacaacccagcaaagcacagactggaatttcccattcatcaatgagaaaactaaagtccagtttcccaagttttcatggccagcaaagatttgagccatgcccatgtgttcctagagtcactgcgccagcatttccatatctgggctgtgtctctcctaacatcctcatgctgcattcacgtgagctcatgaacgcatgaccctgcaggtctgtgagcttgctcctggtggcagggaccccacttattcattactaagcctctaatcctgccatagcacctgggacacagcagaggctctgaaaatatgtattcgatgagtaattgagcgagtgaaagagtaagtaaatgggtgacaattacttagaacaaccactggggcaaaagcaaaattgagaaatgcatgcaaatcattaggaaaacacatgcaaagccttcctgcaaatcaacctctctgagctctttgaaccctctcccccacccccaggcagtcaaatcttttaccttctccttctccaggtccagcatcttctgggtcagggcggcctcggtcccctctatttgcttcagccactagaaaacagcagggacaggacgggtgcagcaaagtgagagtcagaacccaaggggctgtggaatttcacaggtgtgtgaatttcatagatcggcttcctcagagtgtgctcaggaatgggtcaggtcatggcacacacatgcctgatctgtggatggcgtggttgtgtgtgcatggtccagcctgcatgtgcaggaggtcttaggtgtgagtgtgacatgtacgtggtgtggaagctggattcagagcctggatggacccgagtgtgggcggctgcgagtgtgtgcagcagaggaagtggtgtggtatagctgatgtcaatgagtgcctgctctgtgctgatgcttcacacaggagacctcatctgactctcttacgaccaccccaagcagtaggcagcgtcacccctattttgcaggtaaagacatggaggctgagttaagtaacttgtccaaggtcacacgggtgcagaatggagatttggaacccagcctgcaggatgccaaagccactgccctcatccctccagcaacgtgagttggagcagcccagagtgcctggtgccaccatgagaggaggtggaatcacacacagggtagggggtgtaggagcatgaaagcagggttcatgccaggacatgagggcgcaggcacggagagtacggggtgaacaggcggggcgtgcacctgagcggcaggtaagggagtgggagctctgtccacgttccctctggggtctgggctgggggtgagcacggaggcaggtgtcatacgtggatgtgcctctacgaggagcccctaaaacgggaggaagtccaggccagcacagggtggctgccctgtgggggagggctgtggggagatcagggcacctaggggtgtccgggtttgacaacaccattgacctcctcattgctaaggctgtcggatggcctcccactgccaggccccagctgcggagcgccctctttcccgaccccaggccccgctgtagagtgcttttcctgccaccagatcccggctgtggagcaccccctttcctgactccaggccttggctgcagaaagccccctttcccgaccccaggctcccccagcttccttgtactccttgctttccctctcctctggcggcagctggtcaccctcgccaggtcaccccgcactcgtgaggtcctggagccctgccctcggccttctccaccttactctgccctcccccgggatccaccctccctaccctctctgaaatgtctcatacccagatctgccccaccacgccctgtgtgccgctgcctcctgcacccctccactcccaagcctcaaggcatctccagggcctgccaggacccctgatggggaagagtgccccctccttccttccgtccacttccaacatattggctttgcctccttctggttctcaaacccacccgcagcactccctccccatcaccaaccccccattcccctttcagcccccaggttcatatctgaatcctccccacacaccccaaattcctttctgcccccccagccagcaagttccctaaaaaacacacatgggctcatggaacatccctgttctgctcagagacctccaaagacatcccagcacccccgacaacactggcaaggccccagtgtggggtggcccctgtgatgctcacagcctcatcagtcagcactctcctgtccccactgaaatcccaggccctggtcatcctaactacacagagctcctcgaacatgcccagcctttccatgtgctgtccctacctctcctggccccagcctcagccccaggcctttaacaagctagcatcactcagtcttcaggccctgagctagctgtcacctcctccaggaagcctaccctgcttgagtccgtggggtcagctaacctccatggtgcccatgtcagtcatcttgtgaatgccgggtcgtagcactcacctgacagcgctgttgtctgtttcacccctcaccccgctgccccccttgaaggtggggaccacatttgcctcctgttggacttccttgcctggcacagggcttgacacaagcaggtgcctaataaacttctgtcgaatgaaggagaatcaaggctgtgcaggttggtggggtgtgtgctgcctgaacagaggggactagaactgatcggctcctgccacagaactccttccctaacgccacagtgagctcggcccccagtacgggctctgtgccagccacggtggcagcacccagcaccctgtgccagccgcggtggccagcacttcctcaaacaaggctcagacaagatgcgtggtttcttagaaacagataagcatattttggatggggagttacaggtatttcagttttaatatcctcatgcaagcagtcataaaatgaataaaattaaaatgggaaatccaggtttggatgattacaacatgctgctctcagaacggtttctgcagaacacagtgttgagatttgttgctgctgtcgtttaaaaaattgcatataaaaaataaattcaacaagaccttttagcaacggggagagaacatgaaagcagagagagctggccatgaggacccccgaccacgtgagatcagaaatttaatatcaaagagtttggccagatagctgtggaggctcagtcactcctgggagaaacagcgttcatggttctgctccaaccccaggagagggggtctcaggctggggaggagaagtgagtccactcacagggaggtgctgatgaactgagcagcctcatgggggcagcatgctgcagggtgggggctgctctccgcgccccgcctcccagggcccctcaggtgcagagcctggatcccctgcaactggtggggctcatctctcctccctccctttggggatggtcccaaggcttcgactcacggccaactattagaaagtcagactatggctcagacctatgcctcattctcctatccatcgttactagtgagaacatggcctttaagacattcccacctggctgaggccggtgtctttttctcgatccactttgaacttgagggagaagagatatgactgctatgatttataaaccctccaatgtctcatggttcaggttctctgtggggcacgtgccatgtgccgaggtgagtgagaccttgcctgatcctatacgtggctaaccagagtggggctgatgggtgccaggacggatgcctgtgtcctgatgactgggcagggcctcagtgggcggagatgaggaaagcatgtgcccagggcaagatgctgtttgtagcgaaatcaacacaggcacatcataggacattccttcaggttgcacttcacctacacactaagaaactggcttcgaggctgggtgaggtgtctcatacctgtaatcccagcactttgggaggccaaggcgggtagatcacttgaggtcaggagtttgagaccagcctaaccaacatggagaaacccgtctctactaaaaatacaaaaattagccggacgtggcggcatatgcctataatcccagctgcaggaggctgaagcacgagaatcacttgaacctgggaggtggaggttgcagtaagctgagatcgtgccactgcactccagcctgggtgacagagtgagactctgtctcaaaaaaaaaaattaatgcctctaagggaacattgacattgacttccacttattcggatacccgtatggaatgacaatttttaaaataaagagtatttagtggagcaggggttaactggggcctgtcagcaagccttccctggcagtgacattgcaggtgctcaccccctttgcaaacttccctgcagtgcctgtcggctctagggtgaccagcttgtccctgttggcccacgactgtccctgttttagcactgcaattctcacgtcccaggaaagctgtcagtcccaggcaaagcagactgtcagtcccctagtggtcctgccaggttctcagggggtcctgctgatgcagttcccaccccacatgaaggtccacttctggacctgaggagctcttacaccaacatcctctccaagctgggaggagacgagcggcaacacccaagcttactggacctttatccacagacaaatggcagggccagtgtctcctagaacccaacctgagaaaactctggtttaagtctattcctcaaagacgcggagctgggcacctctgtgccaggctcagaatcggggccccataaccgtcagtaggggttgtgagggcctggcaggctagggcgactggcacagctctctagcacgtagggcacaaggcacagcaccaggctgaccagcttggggaggttggtggtcaggggcaggcgggcggcagtgggggtgggcagggtgcaagcggggaggtgggcagctgccaggcgagcagagcatggtgagggtcaaggcagacagtggccggatcccagacaggttccacctcctcagctgtcctagagggctgctaatctcacagatgcccagaggatgaggagcgctggggacctaaggtgcaggcctggaacacctgctgtgggtcgggcgtggggaggggtacatcaggaacggctcaggtgggagaactcagcgccctgcagagggctgctatcactgaggctgaaagcctcctgccagctggcgccctggccctccaacaccccctgccccagccccaggacgaaccagccaccctgagtcaccagcaggttcctgctccttgctcacccggtccacaggcattgaccaagcatctccaggaagcaagcatggccccaggtgcttgattgaacctgatggcaatgcctgatcccactgaaatatgcagcctcctggattccgacagacactgtgagccaccaggatgctcagtgtcatggctgagagagatgtggtgagaaaccggctgaaacccctgcagctggcacgtggtgtagccaagacgcaagccaggagaggcctccccgacatcaaagcggacactggtggatgtgacatctccacgtctcccagggccgtgctcagcacttgacactaagatgctctttctcagtaaatattccagtagatgttgaataagctgagtcataagtgtttaatcagcactttgtgtgactacacggagcactgttggaggagcctaggcagccacggagggttttgctgctggaaaggaaggtgctgaatatgccccatgtgccccgccccgtgcctgcacctgcacctgatagccaccagccggccaggtgtgagtcatccccgtcccgcggttcaccagaagacacaagctcagccaggtttagtgatgataggaacaggagaaagctgagttccaatcctctcactgcctaccagtgtgaccttgggcaaggtttggccataagtcttgttaccaacatttagtatcctttacttgattgagggattgaacagatgccctgggaaggaaactatttctattttaaatgcccttccagcaattctggaaagaatcccaactaagatcattaagacctcatcactgcaaaaatagcattttaaagttgaacccatatgctttgaaaggaaaaggtctttagccacaaacagttgtatatttctaacacaccataaaccagtgtaaaaggcaaacaaatcaggaatgtgttttgtaacaaacaggtcaaaaagttagtatttttaatatgtaaagcactcagagaagtcagtaagaaagacaatgacaatgaatacatatttgtcaaatgaatgaatggatggatgggtgaacaaatccaatggaaaaccctcaaaataaatgcaattacaattcacaaggaaggagaagaaaatagataatacacataaaaaactcagtatcactagcactgaaataaaaattaaaacaatgacgtgatacggttttcaccatcaaatgggcaaagttcttttcagcggtaacatgccatgtcaagcataaatcaacaacgtgtaaggctgcaggtaggagggtatctggtgccgcttttctggacactgttttgacaatgccgtagtccttcaagacattcttactatttggcccagtcattctgcttctaaaatatatcttatgggcatattttaagacgtagatagaaatttatgtgtaaaaaatgtgcagtttaccactgcatgatggtagaaagaaatatataacagctaagaggggctgaagtaactaacagtataactgtgtgatggagagatgcacagccatttaaacacgtttatgaaccatgttaaatggtatggaggatgtttctaaagcctgatggaaaactggatgtcaagtatcatttcaactaagtttaaaaacaatggacgcagggaaaccactggaaggaaatacacaaaagtgacagactgtttcctccaccgggttttgatttcctcctgcgtctctgggttttctacagtgagcatgtgggacttccgtcatgaagagaacggaaaggcatgcatgtgcacgtgcagacgcagacggactggaacgcatgctcccacgcaaagcaagacgccaatgtacagtttcttgtatggtgctgggaagctgggacaaggtgtgagcacagaaatgccgctggcttctaccttttcacacagggcaagcacagttccagcttggattattgcaacctgttcttcatttctcaaattctaaaacacaaaaatgggcaagggcatttgacactggatcccaaatccacgtgcagacagtcagcaccaagcaagtttttttttttcgttgttgttgtttgttttattatgtttgtttgttttgagacggagtctctctctgtcacctgggtttgagtgcagtggtgtgatctcggctcactgtaacctctgcctcctgggttcaagtgattctcttgcctcagcctcccgagtagctgggattacagcagctgggatgcacaccaccacacctggatagtttttgtatttttagcagagacagggtttcgccatgttggccaggctggtctcgaactcctgacctcaggtgatccgccagcctcagccttccaaagtgctgggattacaggcgtgagccaccatgccccgccaacaccaagcgactttcctagcttctctctgagctgcacccgagggtcagctccctctcgctaatggggccagcgcctcaggcagacagctcctgtccctctggttggggacatttcacagagtggcactaagcttttgtgaaacatggctacatgcaagctcatctttcaggacggcaaaaagatccctttctgatttcagcaatctcgtgtgactccacctgcattctgggtagggattctgaggctttcccgtcccctcctcactcaacaggccaggggaatctaacttcggaaccccacttctgacgaatgccaaccccaccacccacacaggaacacggccatacaaaagccttacattgtacttcttagatctcttacatcagagagaaattaaaaacaaaacaaaacaaaagtcacacagaatacacccagatcaaaacaagaacacgaaagcagaaaccgatcgctcatagttaccccgttatcgccaaggatatctaatttcttcataagttcagaaacattcacatcctggaagagatttccaacgttcatttttgtgtgagctacagagaccaaccataccaatttctagggccacggcctttcctctggacaagacaccgcgctctttcttttcttttctggccaagttttgcgcccagccgttcctctggggagtgagggagagaaggcataactgctgctcatttgctgagtgttacaccagcacaaacactgctttctagaaaggccatggaagcgggtgagtcaggacgctgtccctggagctgagcagggctctaggacacggtaaaccccgggcccttctagcaaccacagccaccatctacagaaccttgctgcatgccaggcagagggccaggcacttggagtctgttcatgatgtgtcatcaccccagcttcacggtgtgggtattgtcatttggatttcatagcgaagaggctaaggctctgaaagtttacaggccagagcagtggtggaactggggttcacactcagggctatacaccaagcctctgctgttttaaacatatgggtcaaaatagagtcacatttggtgaccctttaataaatggacaaactgtgactttcaacacaaggggtatctcatgaaaatcaattctatcccagcactccccctttgcagctgagccgggcactgagcgagcccttggctggcattcagcagaggcaccccccaggcacgctaccttaactccttcctggtgacagaacagctggagagcgctgctgtggttctcggggaaggtggtgatttggaggttaaatgctggcgacctcctctctctctcctggggaaaagattcggtttaaaaacagaatgtgaccggattatttaccacttgccattttcccacgttactcagcaaaaaccaaggaattccagtgggcacagacgttactaaaaagcacgagttcggactagaagcagcctcgtccgtgagctacgacgttttcacgccttcccacgcagcagttctccatggaaatgtgtttacttcttccctattcatctagggagaaatggttaacagggtaccgtggctttatccattgtgagatcaaaacccaggaaatcacagaattacaaaatttaaaaaacacagttgcactaaatttgaatagacagcaaaagccaccaactatggtttattactctgtgccaggcacaccactctcccgtctaatcctcacactaccccaggaggcaggctcattgctttcattctgtagacaaagagaaggtggtggcccagggaggctgtgtctgaggtcccacgctagcaagcggcagggccaggaccccaaaggctgactttctttctttttctttccttttttttttttttttgagagggtgttctgttcttgtcgcccaggctggagtgcaatggcacaatcttggctcactgcaacctccacctcccgggttcaagtgattctcctgcctcagcctcccaagtagctgggattacaggcacgcgccaccacaccgggctaattttgtatttagattttgtttcttttttagtagagacggggtttcaccatgttggccaggctggtcttgaactccagagacctcaggtgatccacccgcctcggcctcccaaagtgctgggattacaggcgtaagccacctcgcccggccccaaaggctgactttctgttctttccaatacaatctgccaataccattcacaattgttttctgagccacactaacacaacaagtgatcattctacccctgccttagacttacagcaaagctcaattaattactaagggaggaagaagagcaagccttttcccagaagaggtatttattaatcatacataaatgacaaggttttaaaaggtcgggaaaacctaattacttacagggctaaagcacagtggcagaacaggactcaggtctcagatgtgtttcctgcacagaatggactttaaacactttagcgatggacagatttgtcatggtggggcagcagagaagaccttttcaaattacacctttaaatcaaactgctttagtttgagcagagttacggtaaggtaaaaaataacatgctttgggccattctagcagaatctagctacagaaccaatgggcttcttgaataattctactaagagatgtagccaagagaggcacgaatctagatggcagggcttaagaagatgctctggggtgagactgaaggaaagagggagggctgggcactaattcaatcaatttccatgaagccctaacctgactaacctaggtttgaaacagtctagtaagaaaaccttatttcccttattagccaaaatttaaaaaaataaaataaaaaaaaaacaagcaaaaaaacaaatttcatgatggttccattccacagatgactttctaccagcaaatttacttaaatggcgtccccatagaaaaagtggcccccaaaactcagattttatatgaacaaaagtcattttgtaggccgggcatggtagcttatacctgtaatcccagcactttgggaggctgaggcaggtggatcccttgaggtcaggagtttgagaccagcctggccaacatggcgaaacctgtgtctactaaaaatacaaaaattagctgggtgaggaggtgtgtgcctgtgatcccagctactagggaggttgaggccggagaatcactcacactcgggaggcagaggttgcagtgagccaagagtgcaccacgccactgtcctccagcctgggtgacagagcgagactctgtcctaaaaaaaaaaaaaaaaaaaaaaaagccattttgtttctggtggttctgaaggatggtggagaccattaaagaaaactctagtaaactgggtagtgcttatagaattctcatgagaaagactcataacaaggatttgtgaaaggttctctaacagcggcaggagtattaacaatgacctcacataacttccaattctgtcgcacaaataaaatgctcatgtcatgctgagccaagagctgagtcactcttggtgtgagaaatactcaggccacaggtccctgcccacacgacaaggtacacacggtcagttctaatgcagacagaattgtaactcaagccggcaggagaaaacaaaattggggaagccacagacactgtgaaggtgctcactttgagggtttcacgcatgcaaaggtttcagctgagagacagcagagctgcgccactacaggtgcttagagaaactcatcacaaacttaagtgatgtttaaaatgccaatgatttttcaacagaaacaaaaaaaaggattatgaagtaccatgagagcaaggcaatacagtaacacacccgaggtaagatttcagctggaagcagtaagaccattagtattctttcactgaatctcactcggtgcattggggcagttcctgaaggaacaggatttctacatgtgaacagcaactgatctccctccagtagttttgaggtgcagtttgagttgcaaatagtaatttctttagtccaatattgctgcaatgcctgggtctgtatttactggataaaagagtttgaacaacgtaactagttttcttaaacgcctatgcaaatacatccttctaccctgtctttacttaccttgtgtttaccttggcaaatagaaaatgggcccaaactggcattaaacacattctagagtcaattgctggctcaggtcagactctgctatttcaaaaggtgagatttactgcatgcaagatcacttaaaaaggtgtgttattaattgcaacagtgcttccgtctgggtgtgcagaatgcgtacccggtgactacgcatgcaggaaagaagtagttatggaaatgaaacacaaataaaaaaggcaaaatattgcaaaaacaaattattttattaagtgcaaaacaagccataggcaataaatatattagctctggtacatgtccatagacttgggtgagcacgctctccagaacacattaaggcagtgaaattattctgaacatacagatttaaaaaaaaaaagaaagaaagaaagaaagaaactataacatgtcccctttacacatgcttgaaaacatctgagagctttacatgaatttcagtttgggttcaaagagaatgtctgctccgtttgagagtttacaacagatagagtctcttacttcgagttctagcactctgaattctaacagctcgttctgatccttggcgtcttgcatttcattcttcagctggttctcttccatttccagtctgtaaatctagagcaaagatacctgcggattaacaggatgggtgggagcactggggtcccctggtcacaggccacctgactgagtggctggagggaaacagacgactggccacggaggcaaggggcaggagagggcagggtttgcagcaagcaaacgaatgaggtaggtgctgcaggtcctttttgctgatgcggctggaaatgaaggagacagaggctgggccaggttcacccctgcacctccgagcctggcccagtggagtaggggctacttacatatttgctgaataaatgaatgatggggagactgaggcatgaagctatgaagtcccttccttgaggccaaacactgggaagcaagagtgccacacccaaagcctgtccaggtctttccaactcaagccccaccagattcaacccacccagacagaggcccagccagctgcggcagggagggcccctcctgcttccccacagagcttgcagaagaagccgtaaaggcaggagttctctgagagcgcagatcagtgtgggaagtgacaccgcctgcatcccagacccagctgggagacgctggatcactcagcccactactccagccctcaccttctgtccaagaagggaaacagcagcacccatcgcctggcagcagcgagaagtcactaaaataacgcatgtacacgagggctttgagtaaagcctcatagcaccattacagaaggctagaggggggccctctgccaggtgatcccacccccgggagacctttagaaatgggatgagggggtgagggttttctgcggctccctggatttagtgaacaagacaccaaagatgctaaaattctcccgaggcctggggttgctcgctgtcccaaatgcccttgtcccaaatgcccttgagaaatgcagggaagggaatggggccacatgctggttagcagcagattgggggctgggccaaggacccccaccagggccaggccaggttcctccagtcctggtgccccaggatgcttaaaagctgaggcctaacctagggtctggctgcacttacttgcaacatccagagacagtggactggaggctgccaggggccgggaggcagggcagaggggggactgcacatgggcaggaggggtctttatcaggctgatcatgttccaaaactgcattgcggtgatggttgtgcaacacagtagatttacaaaaagaataagtgaattgtacaccaataaggaaaaaataagctacgattttaattccaaagcattagagctactcgccaagcagactctccgagagctctggaaagttccacaaccagaaagagaagaacagaggcccagttcccattatgggtcagctgcactgggctgagatggcctgaggatctgcccatggacctgcctcaggcgcccaccacactggtggttgaagggctctggaccataaagccacagcagaggcggcctggagcccagtgtcaggaagatggaccagcccaacaataggccagccctccccatttcttcagttgtccccagaggtcagggacagccctccccatttctgcaggtgtccccagaggtcgggccagccctccccatttctgcagggtatccccaaaggacagggcagctctcccaatttctgcagtgtgtccccagaggacaggccagccctccccatctctgcagggtatccccagaggtcggggcagccctccttatttctgcagagtgtccccagaggacagggctgccctccccatttctgcagagtgtccccagaggtcggggcagctctcccaatttctgcagtgtgtccccagaggacaggccagccctccccatctctgcagggtatccccagaggtcggggcagccctcctcatttctgcagggtgtccccagaggacagggctgccctccccatttctgcagagtgtccctagaggtcggggcagccctccccatttctgcagggtgtccttagagaacaaggaagctctccccatctctgcagggtgtctgcagaggttgggacctgtcctccccatttctccagggtgtccccagaggagagaacctgccctccccatttctgcagggtgtccccagaggacatggccagccctccccatttctgcaggggtcccagaggttggggcagccctccccatttctgcaggtgtccccagaggacagggcagctctccctatttctgcagggtatccccagaggttggggccagccctccccatttctgcagagtggcctgggaagacaggccaggcctctccatttctgtggagtacccaaggaggatgacctaaaccagctctgcagacctggtcccagaggatagaaccacagatgtggctttgattccatgtgaggaagacatctctcctcatgggaggtgtgcaggacccgaggccctggtcactggagtgcccaaatggcgctgggcacgacccgtgtagtctgagcaggcccgcggggtcccaactgccctgcggctgtgtgcttccctgaggtggggtcacgcaccttttccagcaagtcttggtttgttctgatgagcagctgcttctcttcaacccacttggaatcctaaggaaaagtactaaatatggtcacattcatggaagcaaacagatggtcaagtaacaaacttttagtgagaaaggtcactttctatgaaactgaccatggaaaggtcataaaaaatgacagccgtgatgtgccctcattgtccctgtccacttttaaaccccaaaaagagaaacggctggtttgtggggcatcccttctccacttcgttcacattcccaaaagcacaatgactccattctgtccgtctaattaacagaaacatgcctccagggtgactggtccacactggcagaccctccacgcatgcggaaggctgacctcataccccgcagactggccagagccacactgacatgcttttgttcattccactctctctgcctgcgatgcccttcccacgtttctttgcctggtcgtatcctcttgcataagtcctgtgagcacacggcaccaagtccgtcttgtcgctgtggcaccctgagcctggcacagtgcctgtcacatggggacagggggactctgtgaatcccggaatggatggatgaaggaataagtaaacgcatgggaagccctctccaactccctcctcccttctctgctggtcagccacagagctggggctgggctgaggcccctcccaagcaccaggctgggccgggctcactgagtcttgttgttctaggatgctgagaagcagaggcccggcctagggtctggtcccaagcacatggaatgcacagaagaggccctggttgcctccaggcttctgtctccctggcacctggcacctgcatcatcctcatgctgatccatgtgtgggcctcaccaggctgcgagcacctgtgaggagtggctgtgctccacccaccttttgtctgtggcatattgtggccaaaaatggctgcaacactccctcccacctctgtgtgcaccccctctgccatgtgacttggcagctcctcccagcaggtgatggggtccatttcttcaacctcaaagctgggctgggccatgccatgctctggctactgggatgttagcagaggtgacctgagcagaggtttggaccatccttgggccttgggcttgcccccaaaccatggggaaagaagccaggtgggcctccctgaggtggaggcacctggccgggagctggcagtctgtgcccagcctgagcccagcccaaactgctgatccacagaactgtgtgcaaatagaacccctgctgttctaaataactaagtattggggtggtttgttactcagcaacagcaaactgattcagcgtcccaggtaccagcactgggcctgggataggtgagagttctgggaagtgcttgctggatgaatggacacaggctcagcctcagacaggtgccatcctccagcaggcatggagggcagagcaggccacacagagaggacctacccccctgggggaggctaagtgtggcaagtagaaaagttcctcttcaaagtttcccttcttatgaaagaataaatcataagtgttaaaaataatagtttctttttaaaaactaacttccttcaagcctccttgcctttatactaacaactctttgttaagcccctcctatgtagctgttagatataagggaataagtacattctatgtctttgtactttaaccaagatatttgttatagacttgctcaagcatgtcccagctcgcagcttatgtcccttccttatttggaaatgttattacttctctaagtcttttcgaaagcaacttcctctttccctttgttctctattacctttacctatctagaaaagttttaagttattagtcaattgggtctagcttagactgggaggtccagttccagccaatggagacaggacacagcagtaaggaaccaatgcataaggaataaatatccctgcttttctttgctcaatgtgctctcgtggcaggactgctgacaggcagcaccctttctgcagaaaggaaaattgccttgctgagaaaactttttgtctgaatgctaatttttccttgcagtgccaaggaataagcatttacttacaacactaagttagttatagactgtgatcaggcaagttacagatatgtgggctcagcctggaagagggaaactgaggctagcagcctcaaaaaacaaaaaagccttatcatctcgcacctggatttctgccccagctactcctgggttctcctctgtcctcctgcttaatgtgttaggtattattattagccccattttaaagatgaggaaacggaggcacaaagagattatgttacttgcccaaggttatgcaacaaggaagtggcagagctgccctctgacccaggtggccagctatagcatgtgagctctgcgtcacgatcccaccgcatggaggatgcagaccacagtttagagaagccattccagagggctgggcactcacattcccccacgcagtccattggtaaagtctgctgtggtgacctgctctgtgccaggcatgcatgctggtcgctggccgtccgcctccatgggaacctcagtctcaaccccgagccctgcggcagccattctgagctgccagctttgcagctttgcagctttgcagtgctcttctggagctgcttctgttaagccgcctggaacctcttacaccccttgcttcacacccgcctcctcccactgtatcccaccaggcctaggaactgtggtagaccttgcctggcctcctcagccccccatagatgcctctctgcaggcaggggtgggggccaccagacactccgtctgcccacaccctccttggcaccctcactgttagtggggccacgtgactgatgaattttgctgaggcagcaaacagccaagcagaggaaaagttcgagatggggcagttccaagatggtggtgcccccctccctgaatccctgagaggcccttgggagaaacaggagtgtgaacagaatacaccttgtcacatggagccagggagacgttcaggttatgtcaccacagcagcacttctgacacagaggaggccgacccatacgaaccttcgcatgccaccccgagaggccagatttccacccagagccctctctggctcccccactccaggggacaggtctaggcccaggcattgcttttctgctgtgtctcactgtcaaccagccttgcctaatcaaatgcagtggatgggtaggtgcagttgactctaacctgagcagcacaggaccagactgttctaagacacagaggccagaggtggggcctctgcaataacccagggttagtcatgggtgctggttcattttcacaattaaaatcttgatagaaaatgacagctcttcttcaggttcaagtcaaaaacagctttgatcacacctttgcttttggaattacctcttttttgtgcatttggcaaacaaacaaagaaaaagccaagttagaatgccataccttgttttgattttttaactcggcacacaggtacagtagggagcacattcgtgcctgggttctgctagtgttttttcctctagcgtctctggagctcctgatccagccccacagaatgtcccccttggcacaagggcgagccccagggataccaccaaggggacagaaaggctaagattcacagagcacagatcactcctgctcacctgtcccttctcaaccagtaacttctccaaatcttcgattttggcctgacacctcagcagatcagcttgtagctgctcccgagtctggaagggaaaagaccaggcagtgagcaggtcacctccaatgggtgacagggaagcggaaagcgtcatgccccaatgcaagcaatgcctagggtccttataggcaaaccttaggaacaggttcacttttaggagcacgtattcaaccttggcctactagaagcatggctcagcttcaaacacaaaaatcattaagaagagaacagccttgtttggttttacaaaccaaaacttgcttggctttacaggcaaggaaaatgaagcctggagaagggaccctgtttttgaagggggtgagtgagccagaagccagccacactgggggcccaggcccagctctctgaccaagtccaatccttactgaacctgaagctcattcagccatcatcagacttcaacacgctggcacaattgcatagcccctggcccaggccccttatcacctgcagcaggagctgcaaagcaaaatacttcaagcaccaagaaagtcatataaataagggaagtcaactgggtgtggggtaacagggagtggtggggactgtggcaagccagaggcacacgtcccatctcagggagacactgctacccagcagcagccacaagaaatgggacgcctgttgctgccagatgttctgacctttcaagagaggtcaggaacctggatttctctatagaatctcttgatttttaaatgttggcaagtagatgaaatttaaaaagcgaaacaaaaattattcagcccacacaaagcctcacagtttccctcctctgacctagatgacaaagactgggccttttatggtgggacaagcagcttccctccctgctgacctcactcccccttactcctggctccccgctacagggccactgctgcccctggaacaaactccacgtgggcgtggcctctcctctctgcctttgccatcagatttgccaggcaatgccccattctggcccatcgcctttaagactaccaaaatccatccatttgtggaattcccaaacagggctctgagaaagagcacaggccctgagtccgagaaacctggcctcgactcccagctctgttcagcatcatctgggtatttgggggcaagttgctcagttctgagcctgtttcctcattcggaagatcgggttaattcctcctgcttcagggggccagtgtgggggtgagatgggggaggggatgcagggaagcacccgtgtgtgctctccgggagtcctccacactcccaggaggaagcgagagcaggccccagtctatgtgactcccgaaggtgggagaagggccagtggatggaagtttccagaaggcagagctcagcctagcctgaggaatggcgtggcctggactgaggtggtcacagggcccagagtgccttggtggctggggagcaccctgagagtccctgcaagtgttctggtggatgtcctggagggcggggggctggcagccctggagggagcggagcctgaagcctgcaagccagccaagtctgtgatttcatcacttagtgttaaattctgaacacatgctctcctccaaacagacggcacaggtgatatgtagcgttgcttcctctaacagctcaatgttccagagcgcctgccatcacaccgaggatgcagagagggatctagaatgtcaccacagcagagaccttgctatgggttccccaccacctctcagaatcccctctgagtgtccaagccagggtatgtcacacttctggaaaggacctacatgacctggccttcggcccctccctcgagccctgaggctggctgcactcacccgggcctccctctcagcgtccagcgtgcctcccacctgctcctggagcagggcgtaggcgcgttgcagggcctggtactcccgggtcagctggcagaagcgcaggtcagcctcctctcgggctgtggccttcacataatggagaagaaaacaaataatcaagtgcaaaattacaataataaatgatttatgattgattttaataataaacataaataaacacttgctatggctttgagtgccagggtcaacttagacatcaaacgaccacatctcacagtgctgccaacaggtgcttaaggagcctcgcattgccaggaagcaactagggcattggaggaaagggctgccaggaggaggcacctcctcagccatcagcactcctcccaggagctcccacccacaggaatcacttgagttatgtgggagcaggtgggagagaaagggctggtaccatggaaccagccccaactccagaagcaaaggtctccattgtaaagggtgtcccctcccactgagcacctcccattctgggaatttatcctaaagagatggccgggcatggtggctcacgcctgtaatcccagcactttgggaggctgaggcagatcacctgaggtcaggagtttgagactagcctggccaacatggcaaaactccatctctactaaaatacaaaaattagctggttatggtggtgggcacctgtaattccagctactcgggaggctgaggcaggagaattccttgagcctgggaggtggaggttgcagtaagccgagatcatgccaccgcactctagcctgggcgacagagctagactccgtctccaaaaaaaaaaaaatggccacataagtgtgtaaagacacaaatacgaaggagctccatgcatggttcacaggtgtggaaaacgacacagcataaatccctcatcagtgcgtgctgctcatccatgggaaagccccacatggccatgagagaggatgaggcaatcccatgttctggtgctgaaagatgcctattacatatcactggctgggaaaaagcaaactgaaaatcacgcatcctgttttaagttaaacataaaaggcccatggctgagaacaagaccctaaagcctgagtagcctagtccagacccctgtgcaggacaggctgatggactgttgtgtgcctccagcactggcctggcccctccctccagccggcacttgggctgaggctggtgggctgacggggaggatggtgtgtctctcccagtgtgagaaaggatgtccaggggacgacctgcagaggtgacatgtgtcccctagagttttggcacaagatggaagagcaaagagagggccaccttggggttgaatgtgccagcgcctatagcatgtgccacattttcctatggcaaatagacccatgggaggaaaccagcctagaagtcattccagatgggactccacagaaaatgccaccaggaggggacaaggacaacaagcaggggtgtgtgggaggcggaccattcagagactcgggatgtgggggcgcaaggagctgcagtgcccagtccctcaccaggaagctgtggggtgcagcacagcaaggggagcttgtggagacctggagaagtgctccctcgcgaggtagcgcgatccacctgcccctgccggagggcactgccctgagggccagctgccccggcatatccgcacccccttcccactcttgctcttccctgggctcagaaaaagccaccaggggcctgcatgggaagaggcagaagagcaaggtagggaaacagcagccaagcctgacgcaggccctggtggggagcaaggggaaggtctgcgctgaatgaagtctgctgtttaggaaattaatcaaatgtgattattcccatcactggaaggcatagaagcccacaaggtctgcctgagatgtaatcagcactcctgaaagaattcacctggggaaggtgagtgagaacgaagctggtctttgccccctcacgaatccaccttgctcaagaagctggctatgcacccagatgggcacaggtggtcaggacagggtgaggcggtgaccttggggtgatgggacttcagggctcttcaccttcttctttatatatttttggattacatgctttatcttagtcaagaaagcaatgatgctgtttctgcccggtggtgtgtccgtgtgtgcacacatgcgtggggaccagggagagaccattacgcagcagttttaattgcaaatggtgaggaaacccaaggcaacatccctcaatgactcagcttgaacttggcagccacagatttccttggtggggaaatcagtgctggggaaagaaagggtccccacgtgctgccctcccatcgccattcatggagcccacagctgtggggcccgccttcccttcacaccattggctttgataatgcactggtaggaactggtcatctggggttcagaactataggcaagggagcgaaacttgcaactatcaaaagcaggaggtgccgccccgagagcatctggggtgaggtcccgccctctctgcaggtttgcttacatcgtccaagtcttcttcgggcgtggctggggtcctgtctgtcctgtctgtgttgtaggatgtttcggacaacgtttctgagtccacagactcctcatcaaatccaaaaaatgtctccacaacatgcttctgtaaaacgcaatttgtatgatgttagcaacgactgaggattgccagagtctaccagtccctggtcgtgggcatgccagtgcaggggggtgatgattgacatttgggccactggggcatcacaagatgcggttggtgggcttcgtaactgactgggtgggataaaaggtggcagcaggtggcggatgaccctagggtttacagcctgagcgagctagtctggccctggtcctggctctggctctccagctgtagacctgtgcaaaccacttggcccctggagcaccagcctccttctctagcaaatggattgagaagccacctcacctgtgagcacaaaagggggccatgcatgccctgtgcccagaaagcagcccagcactccgtcacgctccatgagcagcgcactggctgtaccaaggagaagggggacagggtccagggagatgctcagttctaaggagaagaactggatgaataaggacagcagagggggcaacagcttgaaggagtggagagcccagccatagtcctagtactctgactagtgtggcaaatgtgtggcccaagtcctggccagacccacacttagaggcaatctctgcttaactttttattatagaaaactgggaagattcacagaatgagaaggaatcatgtaatagaccttcacacgaccatcactcagatccagaggcaaattgtaaggctctatgtgacggcctctgagttgccctgctggcacttctcccactccaaatatcataggatatggggcttcattcatctgtctatcaattcattcactcagaaaacactggcaaagctccttctatgggccagacacggggcaggcctggggaatacaataggatcataaccaggccaggtccctgccccaaggagcttgcatcccctaggggctacagacctcaacccacaatcaccagatcaatgtctcttattttaggaacatagcttttttgggtttttttttcccaaacagcccccgacaaggatttttatttgtttttacaatcaatgaatgcctttcagaccatgaagaatgaatcaaaactgaattccagagcccagcccaaggctctgctggctcatccaaaacatgacttcacccagagctcccccaacccacagagaaaacccaggcactccccacatactaagggcccctcccagcctgagtgttttacccagatatctgtaaatgtgagaaaaatgtgactggcaccagagttaataatgtgattaggaaataattcagacataaggcaaggaagaagatgcagggacacccttgtcaccttacacagtttctgaaggtgctgcaagggaggcacccaccaccacacgtcacccagaacgttcttgcatttggcacctgtctttctgctcactgcatcacccctcccacattcctccttgctttttaatatgcatggggaatacgactctcccccgaactccagactcatacgtcagctgcgtcctttatggcattgtggaatcctagcgggcagtgacttacccccaacaccgcacctcccgcaatctaacctgagtccagcagcagcagctcatgcttcagttgcccaggccccaatcccaggagtcctcccctgtcttctccacctctcatgcctgccctccctgggagaaaccctgttgtcttcaccttcaactcaaaatccagccctctctccccctctctccattgggaccttcatcttggtcccagccaccaatatctctctctctggaattattaaaaccaccaacatccaggcaggctacaagtggtctgcgaggccctacaggatccacctcccatcctgccctggcatcatccctccctctcctcctccgctccaggcttctgcaccccacacacacctgccatggggcctttgcgctccgagacgctcttccccagaatccacatgtctccttccctagattcccttaggtctctgcacaaatgcaaccatatgagaaaaggcttcctggccaccatgcccaggtccctcctgcttcacccccgccccagcctctggggcctccttctttattcctttccatagcacatctccccgctgacgtaagatctggcaagctattgtgtttactgatggtcttccccctaccccttgaaatggaagctccatgaagacagggggttggcccttttgttctcgactgtatcccagtgttaatgaactcaaagccacactagtttgtctatccacaaacagattttgttttgcacatgacaccatttccattcattcacacagctggcatcagttgggcaccatgtggttacatgccccagatgagtctcattggcaggtacgtgaagactatgggcaccatcaacttcaatgtcatttctctccttgcagaggctggagacaatcatctactcaaatctcccctctggatgagaaccccacccgacttcaggcatcatggactcttccaaccagctctagagagcagtggtagtgacatcccatggtgacaatggcacccacgggagtgatgcatctgcagcactcaagctcttctgcacacacaggtcacccccctgagctccaggttcactcaagctcttctgcacacacacacacaggtcaccccctgagctccaggttcactcaagctcttctgcacacacaggtcacccccctgagctccacgttcactcaagctcttctgcacacgcaggtcacccccctgagctccacgttcactcaagctcttctgcacacgcaggtcacccccctgagctccacgttcactcaagctcttctgcacacgcaggtcacccccctgagctccacgttccacatttttctgaacagccactgagctgaccttatttcttgtaaacactgctaactgcaaggcctttggggacgagtctgtttgttgctgtagcccaggaagcatcatcaagttacacactttccaaacatttagaacacactgctgggctgtgaccatccacgtcagcatcagggaccctcctgggggcaacgactcaatgctcaattacctaggacgatccactgtgaaggctctgcaggactaccagttaaagactcaactctcaagccctaatacagggcattaactaccaatgctgccgaaaaccctacaggactgctagttaaggactcaactcccaagccctaatacagggcattaactaccgatgttgccgcctgtgtttaaagtagagcaaccttagcaaacagcctaactccagacccagtggagcccccgacagtatcatatcatatggccccagagaccaagactccacagaactatgctgctttgagggaaagaggaagcagctcttagagcagaaaccaaacacaaaagggcagtccaatttgaatcctgcagcaatgcagaggaatccacagccaggcacggcacacacagagttcccatagcagcaacgagttgtctgggacccaacccctcaggtttttatgctgggtatttttaaaaattttttaactttttttttttttttttgagacagaatctccttctgtcgcccaggctggagagcagtagtgcaatctcaacttactacaacttccgtctcccaagttcaagcgattcttctgcttcagcctcccaagtagctgggattacaggtgcgtgccaccacatctggctaatttttgtacatatatatttttcttaagtagtgacaaggtttcaccatgttagccaggctggtgtcaaactcttgacctcaagtgatccgtctacctcgacctcccaaagtgatgggatcacaggtgtgagccatcatgcccagccttaacatttttttataacattttataacactgggttagtgtttataacattttataacactgggttagtttgtttcctttagagaaaagttgtgttgagtgattatattatgcagtaagcctacatgtactcgatttctcaatatatttgtgtctttattaataaaaaatagaaacaatatattaatgtttaaagtaaaaacacagtggctatcttccttgaaggcaatgcaactggttttgcactgcattttcaaaaaatgcaggaaataattcaccacctgcttctcaagagatgaggggagaaccgcccagaaaacattgtttcctgtcatgactggcacacagtgggctttaaaaaaaatggcaaacatgaaagaaacttcatttttttgtgtctccactcttctaagagtctctaggtttttcctcacaagagatacattaggagcaaaaatgtccaccatttgctcattctgagcccatctactgaataaaaaggtaattcctctagccttccatgttccttgcaaccaaagcctctccttgttgactcgtttctacagatgaatccagattcagattaagattcagttttggccgggcacagtggctcatgcctgtaatcccagcactttgggaggctgaggcagaaagatcgcttgagcccaggagttcaagatcaacctgggccacatagtgagaatccatctctacaaaaagttatttaaaaagttagccgagtatggtggctgacgcctgtagtcccagctacttgggaggctgaggtggaaagattacttgagcctgggaggttggggctgcagtgagctgtgattgtgcctctgcactccagcctgggtgacagggcaagatcctgtctcaaaaaaaaaaaaaaaaagattcagttttggcaaaatgaatgaagagtaaacatgtctcctccatttacactttgcatatacagaggtgctcttcctcagcgggtcagatgaagcagagggaaaaagaggaggtacccccaaaacaaatagccccccaaccagatccagtctctctcagccacctgtcttctcaccttcctatcattttcaacagagccacctgtcacaggcaggagcatcggtcggccacagccagggaccgccagagaacctcaaaacgcaaaaccccgaaccagctgcctaccttcatgcttataggtcatctcctggcagccagagaagtacaggcacaccagggcacagagacacaggaagaaagagaagtacagcacaaagaggacatattccatggtggcgtgaagctgcagacacaccagcccctgtgcgtgggcttaggcaaaagccacctcgtcggcatccattttcagggcttcctccagtccaaggaaaaagcaccaattctctccccacgcactcccctttcctctaacacacccgccctagcaactccacggcttcctgtggacccgtctgctgcagagtcccaagaacaggagtgcgccagaagacgcaccttcagtaaaagggaagccagctccagggcagagcccagatgctggccacgccaaccgcgggctgaagggagaggtttccaggggcgggatagggtgccttcgtcacagaggacagcctccgaaccagtttattctctggggaccttcctcccagatcccgtcctccctgagccgagagcctgttgtcaacaccatggcacaggccctgggtccccagacaatcgcaaggcccccggggcagcactagcaatggcaacgccacgatagattctccctcaggacccaaaccgaggagctgcctctgtcctcatgtgtttgggaaatttatctgctgttccccgacaacctcataggcaccctagacttgccaaattcactggcttctctaccatcaatttgtcagcgttttaccatttttataggccaaaacaaaccattatttaatagaaaaactgatttttttaactagatcaaagtcttcagattcacctgcccagaagggatgtctctgagagtcttccatctctcggagaagcgtcaccagacataatatcaaaagcaaaaactctcatgctgcagaaaaaatggacagactttaccacaaaaaagtaaaacgtctgaactttgacagataccaaagcaatattaaagggcaatggataattcataaaagaaatgtacatagcaaagttcatgtatgtttcaacttcaacaatgcatgatgctgtattcctttggaagtttccatcagatgaactgtgtgactggattgtgctactcaatttagtgccgactaccctttaagccatgtttcctaatgaggcaccacccggccaggtagtgcagacctgagacagctgggcctgaccccaggcagtgcagacctgagacagctgggcctggccccaggcagtgcagacctgagacacctgggcctggccccaggcagtgcagacttgagacagaggggcctggaggggcggggctgcaatctggaacctttgcctcaagcccctccccacggggcctgaagtcacctcctgaaactaggcaggaggccgggcacctacagacccagcctctgcagcagcttctccctgagaccaggactcaccaccctgctcactcctggcgctggggtttccttccctgtgtgaacaaattacctagaaccaccataggtaatggcacctgtcccttcccaagtctgcaaatgggagttggatgtccccatggtgtttgctaccctggacaaggtacccagtcggcctctgtggccaggtcaggctcccgagctctgctctacccacaccagctgcagctcctctggcggtacctccaggaccggcacagacggtgtgtgtgcttgtctgctgagacgcctgcatgtggtccaggacacagcccccgtctcttcataatcaccccagtgtcctatccccaggacccacatcttccccgagtcctttaccaaagggcccccagcaggtgggacatggagcaatgctcagaggggcctcccatgcttctggcacagagcccgctgtgaaaggaaaataaaaactctgaaccccagttcactccaccaaaaagaaaaacttaagctgaaagctgagtcatgcaagaagctgcctttccttttgttcctaagcagagagctgcagagaaaaggttaagcatctctacaggtagctgctccatgttcaccttatcttatgtaaagtgttgatttactgagcacaagacaattacataattaggactattcccctacctgctccgtttctctcacaacctgtggattcagtcatgtgaccacacaccccctctttcccctccagcccgcttttcccctttaaatattgaacccctcaaaatcatctttggagaaaggctcagatctgtctccagggtacattcttaaccttagtaaaataaacttctaaattgattgagagctgcctcagagactttttgatttacatcagccactcagctggcgaggctgggacaaagtcctgctgcccatgccctctttacctttgatcagagctgcatgaaatgagtcctgatggctgctgtggaggagggaccaggtgacagggacactgctgagccagaagggaacaagccctcgcccctcccagcaaagggcccacagttacacaccaaccgaggccagccctgtaaacagacatgaagtagccactggtttcacgcagtcactactattagcctctctgagtgcagggcactgtgccagcagcttcgagtagctggatcccagggcaccatccagccctcatgagctcacagactggtgacagccgtggggaaggcagcctaggaataagatcgactgcaaacaaccatgaaggaaaaaatgggtagctttggcaaaacttgcaaatgaaaaatgcatgcacatgatgaaaaaatgtttgactttgggaggccgaggcaggcaggtcacttgaggtcaggagttcgagaccagcctggccaatatggtgaaaccctgtctctactaaaaatacaaaaaaaattagccaggcctggtggcacactcccagctactcaggaggctgaggcacgagaattggttgaacccgggaggcggaggttgccgtgagctgagctccatcacgccactacactccaacctgggcgacagagagaaactctgtcttaaaaaaaaaaaaaaaaaaaagtgcttgagcttcctaggcaggcaaaggtactgtacaaccagctgccagtgtctgtccttccctccagcaggcagcaggcttggcctcaggggtgtccttccctccagcaggcagcaggcttggcctcaggggcgtggggctaggagtcaagtttagataggtcctgcgtgttttgataggtcccatcagaatggatgcaagagccactgacaaaaatggcccgccagacctcaggcatcctccaacccctggcaacagcagacccagagtcatttggggaggaggggacacagcactgaagcactggcccaagaaagggcctctccttccaatgtgctttgatggttcccagcgcagtccccagccctcccttaaaggatgattactgcaaagggcattgagatcccacctcactattataaattagtgggggaggcagggtgtaggcatggcctgggaatctgcatttcacaggccctccaaaggaaagttattgagctataaggtaaaggaagaaggagacactctgacttcctgataacctgctatgcaccaagcaaagaaccagaagcttccttagatcccatggatataatgttcattttaagaatcaaactgaggttctgagcgtttagatgacttggccaatcccatccagctagtagctagggtctgactcccatactgcttggggctacaatttcccaaccttatccaaaatgatgggtccttctttcaaccaaggtgtgtgcgtaaactgtactgatttttagccattatgcatatgcttagaactctgtgatgatacagcttctgtgcaagttccaatagcctgcaacacaatttactgccacatggccagaggcccaggtcctgagcaagccccctaccccagtccccagggcacagtccgaggaaccactcaggatccttctcctccaacctctcctttggggctaacgtgagcccacgctgaaccagcaggctccctgggaaatgagataatcagcaccaatcttgtccctggaggagatcccataaggggactgttggataggcccagtaaggcagagtcatggccctcagggacacaaacgctccgggaagacaaaggtggacaccctctgctttgccctgactgcatcttctgcaaggctctgccctgactgcatcttctgcaagctggggtgtgggagtggactggaggcaccctcctgcagggagtccagggaggtttgctagggtctttctgacagaaagtcaggagctggagagtagggatggggctgtcagatttctggaaagttctggaactttcaatgcattcaccacagtactctgtcaagcaaagcctttggcaaagtgttaaaacacttccatgtgtgatggacagagagtgatgggggcatttcaggggaaaaagaaactagtctagtcatcctgcggtacccatgggggactggttctagaacctcccacgaatactcaaatccatggctgctcaagccccttatacaaattggtgtagtgcttgcatataacctacgcacatcctcttgtacactttaactagattacttataatatcgtacctaatacagtgcagatgccctgtaaacccagttatgtgcagcataacagcatctcagtcctcaacagtatacaacaacggtcccataagatcataacactgtatttttactgtacattgtctatgtttagatacacaaataccattggattacaactgcctacagtattcagtacagtagcatgcggcacaggcttgcagcccagaagccacaggctagactgaatagcctaggtgtgtaggaggctagaccatctgggtttgtgcaagtatacttcatgatgtttgcatgacaaagtcgcctaatgacgcatttctcagaatgtgtccctgttgttaaggaatgcatgactctagttttagactgtattgtttagtgaataatgaaaaggaaaaaaaagtccgggaggtggaggttgcagtgagccaagagcgtgccactgcactccagcctggtcaacagagtgagactccatctcaaaacaaaaagaaaaggaaaaaaagtctgtatatgttcagtagagatgcaaccatccattttttttttcctgaaggttttcaaccagaggttggttgaatccatggatgtgaaacccacagatacagaaagccaagtgtactgaatgcctgtggcctgtggtagagaagaaagagaagcttcttaggcctaaaaggcaaccctggattacaaaacctgcttgggccccgatggatccaagtatcaattcaatccagccctgcacaatgccaggattaagtaggaacatgggagaaaacttggtccacacggaagtctacactgaatcttgagaaaaagaaaaaatgctggtgggcccaggaaacagtgaatagaaaagaccctaaacccattcaggaaagtttctacacagatccccaaattcggcctcctaatgacacggaactatcttcattaaagtgaccacacatcaccgttcttctgcaacaatccagtgtcatacaagtacatttttccagtaaaggcaattcgcttatttagccaacaactatttagggactatttagtcaacacctactctgtgccaggcaatgaacaggccacagtgggcaggacagacacagcccctgtccttgcctgttgtacaggcaatgtagcaaatcacgattcaattccaaccctttgtgaatttctcctcccataaacacattcagaaatcaggaagaatggccagttgcagctgctcatgcctgtaatcccagcactttgggaggctgaggcaggtggatcacttgaggtctggagtttgagatcagcctggccaacatggtgaaaccccgtctctactaaaaatacaaaattagccaggcgtggtggcacatgcctgtaatctcggctacttgggaggctgaggcaggagaatcgcttgaacctgggaggcagaggttgcaatgagccgagattgtgccattgcactccagcccaggcaacaagagcgaaactccatctcaaaaaaaattagtaaataaataaaaaataaaataaacaaacaaacaaataaatatagacaagttctactcaaaccacttcctatttctgagtttctaatgtcaatgtgcagaaatttgccccgtgttcgacttggcttggtgggaaaagcttgggccttgtagtctcagacttgagtttgaaactcagccttgtcaatttaatttttctctgagtttttctatattatatatatatatgtcttctgtagctgtaaaattgaaaaaataataccaactatatggggtggctgtgagaattcaatgagattgtttaaatacccactcatctgagaatccaggacctagcaaatcaccaatgagccaggccactctaagtggcattacctgaacgctgcagtaaaggccaccaggaggcagcctgggagccaaattgcacccatagatatattttatgtggcccacaggtatatattttacaggctgagtgtcctttatctgaaatacttggaaccagaaggaattttggatgttttttcagattttggaatatttgcataaacagaataaggtatcttggggatgggacccaagtctaaacatgaaattcatttgtttcatatacactttatatataatacatagcctgaagggaattgtatataatattttaaataattttgtgcatgaatcaaagttttgatagtgtttttactgcaacctgtcacatgaggccaggtgtgaaatttccctggcctcatgttggtgctgagaaagtttcagattttggagcattttggatttcggatttttggattttggattacggatgttcaacctgtatttggacatataaaattacagacatttaaaatccagcatttaaatccttcaatttcatataaagtaaggtgttatggattaaactgtatccccccaaaaagataggtcgaggtcctaatcccagtacctcagaatgtgacttatttggaaataggatcattgcagatgtagttaaattatcatgaggtcacgttggagtagggtggactcctaatccagcatgagtggtggctttatatgtgaagccacagagacacacaggtagaatgtcactgacaatgaaggcagagattggagttcaagctgcaaaccaaggacaccaaagattgctgggaaaccactctaagctaggaagaggaaaggaggggtctgctacgggttttagagggagggaacgtggctctaccgacaccttaatttcagcattctggcctctagaactgtaagataatacatttcctttccttttttttttttttttttttttgagacagggtcttgctctgtcactgaggctggagctcagtggcaaaatcatgactcactacagccttgacctcctgggctcaagcagtcctcctgcttcagcctccaaagtagctgggacttcaggtgccaccacatccagctaatttttttaattttttgtagagacagggtcttgctatgttgcccaggctgatctcaaactcctgggctcaagcgatccacccaccctggcctttcaaagtgctggaattacaggcatgagccactgtgcccggtctttttcggtggctctaagccactgattttgtggtactttgttaaggcagccctaggaagctaacatacaaggatttatatttcccttgaaaaactggactatctgatgccatcggtccaccttcttatagcaaccaggattcagggcccagtttgccacagtccccaccattccctgttgtcaccctgacaccaagaccacatgtctttggccattcactatcacatttgcacagctgtttcccttatagatgagaaatatttctctataaccacatctccatcaaaagataaaccaaacggggcacttgtgttcaataaaaaggagagaagaccagcctagccaaaatggtgaaaccctgccgctactaaaaatacaaaatttagccgggcgtggtggcatgtgcctgtagtcccagctactcgggaggctgaggcaggagaatcatttaaacctgggtggtggagtttgcagtgagccgagatggtgtcactgcactccagcctggacaacagagtgagactctgtctaaaaaaaaaaaacaaaaaaaaaatggagaggagaactgtgtctttgtgggagccaaaaataggtttacaggtttaaaggcaaactatgcttttttttttttttttggtatcagctccagtgcgctctttacattccagattggtccctgtgggcatttgaattttataagcccagctccttcagacactgttactaggaaatagcaaaagacctatattttccaaaaaagactacagttctgcatgattccaaaaaaacacaaagctcctgatttttttagaacaggatatgctctcatataaaccaaccctgaatgtcccttaaatccttcaaaaggtttaagtatttatgtttttaattttgggtgaatataccctgaagcctaagtggagaatacatcaggaagttttccatgaataaattacaataactgggtcacatgacacggccatatttatgttgctttgagagacggtgatgacaggcttttcatcatcaggcatgcagagatgtgtgtgtctgcttcaggacccctctgtaaaacctccccactccacgacccatctgccctgcagatccgtgacacagcggcaaggtagggcaggtgcaccatcgcaggctcaccttgggcggtttcagacttttccctcgatgccttttggagcgcaacagccgttctctctcctagaaggaaacacaacggttggcatttccagccagcctcacatctcacaaaccaaagccactggctctcaaagggagctgggcctgcccatccgcaccaggcatggctagttgaagttctaagtgcccaagtgatggctgcttctctgaactgagagctacagggagagtttattatccaccttttgactttattgttatttcactgaaatatatttttcatcctaagctgcattgagtcttttgtgtaatgaagcaaagatggatggatagatagatgtatgcatagataagtggatggaaggatgaaagaatgggtgagtggatggatggatgggtggacagatgggtgggtggatggatggatggatggatgggtgaaaggaagaaagagagaagttaaagaggtagagggagatggaggcaggcaaaatgaacatgaaaattataatcaaagccttttctagaattttgatcactagcttttctattctttgaaaaccagtgcatggaaccatcacacacccactttggtgagcagaacacgttctacttctaagatccaactaaagctccctgcaggtgttctctgcctgttgccgaagttcctttcacagagagctgtggaattctctggatgcaattctccaccgcttaggacatactcaaccccctttgatagatgcacgccccatatacacgtccaaaactcacacaggcagtcttagcaaggtgctggtctggttataaggttcaagtttgtgggcctaaactcacagtctgcaactgctaagctaaaaaccaaccaaccaaccaaccaaacaaacaaaaagccttctctggaacagatcatgcccagtctctaaaggccaaaagacatccttaaaactgatgcttctcaatcacagcaagctagggagaagatgtgagaaaagggtagccatggaaactgtccccaagtaccagtgatctcatttaagccaaggctgcttagtggcagaatgaagcgggaatgtgcacaccagggtgagcttggtgagtcccaaagtcagcactgcctgaccctgacccagctcagcagcatcaccctgagccccaacacccgttcctgacacccatgtcagctggtgccacccctgccaggggcagccgcgccagctgtgctagatgtaccagtgagaggtcgtcaatgacgtgctgctgctccagcacctgcagcctcaggaactcgatctcctgctcatccctcgtcaggctgaggtcattcaaggaggtatgccgcttcagagacgcctgcgctgacagcttttctttctgcagccacagggagacagaccaccacagggttacccgccaacagtgtttgttagggacagtgctggagtggagctcaggggtgcagggacagaaggatggatgggaggatgaaagagatgatggcctgatatggtttggctgtgtccccacccaaatctcatcttgaattgcggctcccagaactcccgtgtgttgtgggaggggccaggtgggagatcattgaatcatggtggcggtttctctcatactattctcgtggttgtgaataagtctctgatgtttttataagggttttccccttttacttggctctcagtctgtcttgtctgccgccaagtaagatgtgcctttagctttctgccatgattgtgaggcctccccagccacgtgaaactgtgagtccattaaacctctttttctttacaaattacccagtctcaggtatgcctttatcagcagtgtgaaaatggactaatacgtggccaccttgtcctgtgctggaagaggggacagggcagaccaaagccaagcccaaggtggggctgaccatgcacactgctgacaggaagggatgcgcagggcctgggggtggaagacgacatttgaaatgagcctagaaacctgggaggggaaggcaggggaaggagaggacttcacacaacagcaattacacacacacacacacacacacacacacacctgcatctgctacagtgcagacagcagagcatgtgtggtgacagagcctccgtcttcccggctgtgaagtgggggttgatactactctgaacaatgaacctgaaatcattctgtaaactgtcaactacaagacgcctgccctgaccacaaacaccaggcatcctagctggaggagaaacccctctgcagagcatcgccagcgatcattgtaacagctttcacttgctgggtgtcctctgggcccgttccctgtgaggtctttacatgctgttatttcatcctcttgatgatcctccagtgtggatattttcattcccattttatgcatgaagaaacagaggctcagagagaatgggggatgtgtttaaggacacagctgtctgactccctctgggcacaaacacccacagcacagtgaatgtgagacaggtggagagaaaggcgagacatctgtgactgacactgtgcctggtgctttgtggggaggtgggcagcaggtgcgccccagaacatgtgaatcgggaggttcagggctgaagaatcccagacagagaagggagtgtcagggctgtccccaaggggtccacagctcaccatttccacgttttcccgcgtgaggttcttgattttctcctccatcctctggatactctgcaacagatcctcattcttcttgttcatccgcttgttcttctccaccaggggcttcagctgaacctcggtctctcgtgagcgtttcagctgtggttggaaacagacacagaggctcagacaacttgacgacggacggccgaggtcacagcaccgaggtgagcagagactcaacccagttaggaccccttctgaggccagtgtcctggatgacacatttgtttgctagttgcatgacaatgggcaagttctcagcctcagtttcctcatctatcaaatgagaatcacggcagctcctgtctcctaggcacatggtgagaattgaatgcatagtggtagtctcccagtgttattttcatggaaagaattagaaacaacttaaatatctatcaatatcatgataaccacaggcacagccaacacatgtgaaggggccaccttccccatccgcattttatagacaaagaacctgagcccaaagagaggaggcaatgggcccaacttcacaaagaaagtgccaagaatgctttgcacttttgcaaagattggtggtttgagttcaccaagattcaaacacaagggactgactctagacccctgcgtttactccccaggctgtaaatgttaaggtaaaatattctgatggtataggttgaaatataaaatgtaccatgtgacccatgcattctacttctagaaacctaccgcccccccaaaaaaatgccatgtagaagatacatacgtgtctttactgacttgaacctttatgtaaagtcagtaaagacccatatgtatcttcttcatggcatttttttttttcgagacagaaggtaggtaaaatgacatgtgtcactttgacaaagggtctcacttcgtcacccaggcttgagtgccgtggcgtgatttcagctcactgcagccttgacgtcctggcctcaagtgatctcccacctcagcctcccaagtagctggaactacaggtgtgcaccactgcacccagctaatttttttgtatttttagagatggggttttgccatgctgcccaagctgggctggaactcctgagctcaaggaatcttcccacgttggcttcccaaagtgctgagattacaggcatgtggcacctcacagaaatccagaaagcggcaacagcctaaagatccaccactgggaagagaggtgaacagaccatggtatatccacacaatggactaccaagccgctggtaaaaagacaaagacagatctctaagcactgatggggagtgatgtaattgatcaatgaggtgaaaaaagcaagttgcagaacaatacacagcagggaaaaaaatcccaattcatatccataaaataaaacaaagtctctcggtgagttttaaggtatttatttaaacattaagaacatttaagaaccactccaaactagcagtagttacctcatgattttaagattgaggccaggcgcggtggctcacgcctgtaatcccagcactttgggaagctgaggcaggcagatcacttgaggtcaggagttcaagaccagcctggccaacatggtgaaaccccatctctactaaaaatacaaaaattagccgggtgtgttggcgggtgcctgtaatcctagctacttgggaggctgaggcaggagaatcacttgaacccgggaggcagaggttgcagtgagctgagatcacatcacctcactcaaacctgggcgacagagcaagactccacctcaaaaaaaaaaaaaaaagattgaagcgttggcaaacttattagtttctacttttaactacttcagtctgatctgacatgtttccagaagcctgtgttttttcctaatccactcagtaaactatgcagctcatgagtatttatgagcttataaatatttaaatgaagagtagagacataatattagatgtacagtctgattaaagccaaaaaaaaaaaaacatttaaaaatactggaaggaagtaaatttattttgatcctattaaagttgtgaagaggtgatacttacggacacttttcaccactcatttttttcaaatattctgtggatatacttctcttcataataaaaattagaataaacataaaaattatgaggcatctgtcaagaagttgatgtatcaactgccattacataaaaattagttttgctgttatccagaaaatgtaaacatattcatgaaatttctatttttactggagatttcttttttaaccagaagtccatgttcattatttttaaaattaatgtataagttttagtttacaagtatataaaattttatgcaaaaaagtaaatacataagcacaaattaaaattacccataattacaccacctaaaagaataacttctagccagatgtggtggctcttgtgtgtaatcccagcactttgggaggctgaggcgggcagatcacctgaggtcaggagttcaagaccagcctggccaacatggagaaaccctgcctctactaaatgtacaaaattagccgggcatggtggcacatgcctgtaatcccagctactcgggaggctgaggcaggagaatcgcttgaacccgggaggtgaaggttacggtgagccaagatggtgccaattgcactccagcctgggcgacaagagtgaaactttatctcaaaaaaaaaaaaaaaaagaataatttctaatattcaagatgatgacaatgtattattgttctgtaaaatgcatttttcatttaatttactatgaacacgtttccatttcaattaaagagggtctccatcatcaatcttaatgacagtctagaattcattgtataaatattccataatcactctgccctacgctttagtattgaacaattgggttttttggttttttaattgttgatttttttcggtttcggttgttaacataaacaacactgcaatgaacatcctctccatgcttctcatggaagttctccagttgtttgctaaagataagttcctacaaaaacaaatggcagtaagagatttcttcaatgagcatgtgttagatttttaatcgaaaagaagtaagaaggaaagttcagagaaccagaaggcttctgcattaactttctgtgcagggcatgtttcagggactcagggccccttccttgcaccctatgaggcaccgcctgtctcttggggctacttaccagttcattcctctcatctgccaacagcgtatttctgtcttccagcttccgtatcactgaattcagttcagcaatttttagttgaaatcgcctcacatctcgctcgtccatatgttgatcctaaaaaaaaaaaaaaaaaaaaaaaaaaagtcaagacgtaaatgtactttgaagaagttgtgtggagccttcttagaaaattcacatgacataatgggtgagatccttattcaggggcccacatgccacacagcaaggtggggaacacccaagcccactgcacacctgcggaagactccatctagacggccactgagacttcaaacccttccgtggctccctggggcccttgtggtcaggcccctcccaccccgtatctcttacaaaggccgccacgcaccggcacctcacacagcgtccagcacaaagaacttataacatcccctccaatactgagtgaatgaatgaatgagtgaatacatgccacctcagagtcctctgtggctgaccagaaaaatgccacctaaatgggtgggggaccagcctgaggctggcacaagctgctgcccctcacctggacgcccatgagctccaccatgtccccgatcccgggcgggagctctctctttggactactgtggtgccgctcggcctccttgacctgaaccagctgctcatccaaagcctctttctgcagaagcagcttctgggtctgcccagcctgcacgccaagttccttctccaaggccagaatcacacggtctttccctttgatctcatccatctgaaaaggagaaagaataagcagtcagccctaggggctcatgaccaaggaaatctctccccaaattggggccttcggcccagggaaaggtcaaagcagtgtctcgggcctgggtcaactgaattcagtaaactccagacacagagcaagcacagcccgcagcccagggcttgttccccgtcactcccacaagacagaggagacagagctaagggttgaagcacatacatattcaacctgacatgcatactgacatcagtgtatgctcctgtctctctcactttaatgagatacaataaaacactgccggcccccagccaggcctctgcagctcagcttcttggcagagctggcttctctctccgtctccaggaccatgtctccctctcagtcattgaccctctcctgcctggccacaactccccaaccctcaccaccagacagctcctgccaaggtcaccagtgctctcctggccaccgaacccaccggacaacgttgtcctcccgccctgactccgtcacccactcccagactcacgacctcctgctccctctccccaaggccacttcccatggtttctatcttctttatagactgtcttgctctggctctcattgaagcctggagtttccaaggctcgggcctcttctcactctatatcctctcccaggcagccaggtcctccccgacggtatcaaccccacatatgcagcagatcttaaacacatgcctcagccctggcttctctctgagctccacaatcacagaaccagctggctgcctgacacctctgcttggatctcggagggaccacagcctctccacgtacaaacctgaacttaatcttcagttcacccccagccctgtcttgtccagccttcctatgggggagtgtcagaaaggacacaggctcaacacagtgggccgggtgacagtgaggaaccacaccaaaaaaagtatgcagaggaagtgtcagccccaggtcatccactctggctttttctggatgctccagtgaaggcactgtcctggttgaatagcaggcccccaagacccatggccttcctggaacttcagaatgggaccttatttggaaagagggtaactgcaggtgcaattagttaagatgaggtcatcctggagcagggtgggcccttatgactggtgtccttatgagaggagaagagagacacagaggggaaggccgtgtaaggacggaggcagaggctggagggacacagcctcaagccaaggaactcaaggtcagccagcaacaccagcatcaggaagaggctgggaaagatcctcttccacagccttagggggaagtgtgggcatgcagacaccttgatttcaatctcctggcctccagaactgtataggaacacatttctgtcatgttaagccatgaagtttgagattatttgttgcggcagctgcaaggaaacagatgcaaaggctcctcctgctcagctcactcacgtagcaagttacatttcagtggattacaatccaaagctcttacttctaaatcataaaccttgatttcagacacagactgccacagcagagaattggggtgaagggccctcttctgatagcagagagaagcaggctaaaatcccgcccaccccccaaccctgaccatatgaccatgggcaggttgggccacctctctgactcaacttctgtctctgtaaaatatggacaataggaagactttagaaccaactctgtctaactgttgaggagctttagagcaaccatgagaagaatttggtacagtgcctagcatatcgcaagcctgccatcagtgttcactgccactgttaatctcttctagcccctaggtaacacgaggctattttattttaaaagaagaccactaaaaactgaaaaaaataacatagagatgagagaagaaaggaaatggtactcctagattccagactgagaggttttccagccacataccacggtgctacagttctgatgtggaatttccatcacttgcaaccaaaataatcctaattgacatagagttcaggaaagaacaaaaaacgtgccagaggtatcacctctctcttatgtgctagttgtgagctaggtactaatttgtacttaagagctctctgaggcacctttctttggaagacaaaaggctgtttccatctgccaggatgatatcctggcccctgcaatgggtgctccatgcagtttctcctaagcagctgctgaatgtgcccactgctccccctggtgatgatccaccagcatctacctgcttgggccaaatcccaaatcccgagtgttgcaatttccaaatgggtaggagcactgtcccttccacaggaggaatctttaaacatgctgaaaacaccactgccaatgtagatgccaaccccaaagcaaaaatcattatgcagaaggagtttattcatttaattcactcaagcacgctttcattaactcaacacatgctgagctgagcgctatcagtgggtgctgagaaacattagagagcaaaagagaccagccgccctgccctaggggcttctattctgctagtgggcggagcaggcaataaacataataaataagcagacattgtagtgattgagagtgatttgtgctatgagggggaaaaaaaacaataacaacatcaaagcaaaggaaatcggtaggggcagtggagggtgttgcaaaccaacagtttgtccatcacgggtaagggagggttcttgtctgcccctcagtatcagctttgcagtgaagcccccgccactgccttccactagctccccacaaaagacagcaccgtcgcgagcaagacatctccaggatcccaaattctccacctggaagagcaccaattcccccttgtcctagtaagtgagacagagggcttctgccccagtcatcacaagaaagtttcctagaaaatattctcaaacagcagagatggcatctagaaacggacggagggccaatgcagaacacattccggagccagcatgagagtcctgaggccccagaggttaagacactggccacgctcacgtagcaagaggcaggcacactcacagttcactgactttactcctggatcacaagctgagctcttagtgatcctatctcgctgcccttgggatgctgatgaaatctcaagcttcctggaactgctcacctgaccatatggaacatccctcagcttccttcccgcatccatttccccttctcccatacgcccagtctcagcatgtgcagtaggaaaggggtggaacgaacatcactgcaagttcccagggcagtccccaattggctcatgccacccaaatgtccctgtcccaacagtaattgcttcagggatggatgcacaatccaatcagaaccaatggccagaagtaggcagcaccaggatcctcctgtttttctttaggagctaagaaagggactctgggctgtgtggtgtgagaatgtgggacctggcacagtggtggcatccccccagcacagcatgagagcccacagcctgggaatgacacagcaggaggcagagcagagcccaagaacctgggatcctggatgacatcgttagtgcacctggagctgcacctacagcaaatcccatgacttcagttgggggagccaacagacacccatggcctaagctggtttgatggaatttctgtcacttgcgaccaaaagaatcacaatcaacagagttcagggaagaacgacaaacttgatgttggctatcactcctctcttaatgctagcgtgagctaggtactcatttgtacttaagagacactctctgagtctttaaaagatcctcaaagtggacatcatttaccccaagttacacacaaacttgaggcccagaaaggggaatgtgctaacactctagttagcagcagaaccatgactcaagtgcagattgtactctccaagccctccctgtcccctctgccccaaaggaacagagtccggttgtttctaagcagtcaagtccaccaggaaatgtatcttagtgaaaacaagcccactgacccatgactgatttggtgagctccactttattgcaaagtttgggggaatcaaagactgaagcagaggccactacctcaacatcaattctcattcttggtacctgtagtgggatgaataatgtcccccaaaatgtcacatctaccccgaaaatcagaatgtcaccttacttcgaaatagggcctttgcagatgaaatgaagatgcaaattaagatgaggttataccacgttagggtggaccctaaacccactgactggcatccttaaaagaagaggacacctgtaatcccagcactttgggaggccgaggcaggcgaatcacctggggtcaggagtctgagaccaacctggccaacatggtgaaactctgtctctcctaaaaatacaaaaattagccaggtgaggtggtgcatgcctgtaatcccagctattagggaggctgaggcaggagaattgcttgaacctggcaggcagaggttgcagtgagccgaggtcacgccactgcactccagcctgggtgacagagtgagagtccatttcaaaaaaaaaaagaagaaaaagaagaggacaagctgcagacatgcaggggagaaggccacgtgcaggcagagactgaagtggtgcgactgcaagtcaagaaatgccgaggactgccggccacaccagaagctgcaagaggccagaaaacactttcaccctagagctttccaagggagcatggcccagctgatatcttgatttgggacttctggactccagaaccgtagagaaaataaatgtcattgttgtaagcctccaagtttgtggtaatttgttacagctgcccccaggaaactaacagagcaccacaccagggtttctcagaagccacaggccacgcagtatgggctccaggatcactttaaactagaacatcactgtcccatgttgaccatgatcaccttaaactagagtgtcaccgcctcatgttgaccgtaaccaccttaaactagagcgtcactgccccacgttgaccatgaccgccttagaatgtcaaaacgccatgttgaccgtgactgccttaaactagagcatcgctgccccaggttgaccataaccaccttaaactagagtgtcactccccatgttgaccataaccaccttaaactagaacatcactgtcccatgttaaccatgatgcccttagagtgtcaaaaccccacgttgaccatgacgtccttagagtgtcaaaaccccacgttgaccatgactgccttaaactagagcatcgccaccccaggttgaccataaccaccttttcttcttgacttttactaagatgcatcctaatgtgtagacacaagtccaaaagccttcttgcatttctaatccaagccagctgacaaagaaatgaaaccagcagcccatcttctgaatgtgttgccatgggcaacaggtttgcttaaggagtgacatttatcagacagggtgtgggtgaataggagaaatgaacgtttgattttttcactccttctcctaagtggaccattttgggtgaaaaccatccacacaatgagatacctgaatggggggagatttttgtttggcactgaaatggaaacggagcctttgtgatactggatccctggcacattttaaattaagctcaaaccgtctcttgtgcaaatacacagagtattttttcccccattttacttctcttacatatacatttttcctataacagaagaacacattttacaagtatcctattacagaaactataagctgctacatgctttagctcacttgcttgtttaattctaactctcggcagatatgggaatacccccattttataggtgaggtgctagaggcttggagacagtaaccacctgtcccagggtcacatggcaaacaaatggggagcccagaatcactcagggcagcctctctccaaaggcttctcttcccaccatgtgatgacagctcccctgaacacaaacccatgaacatacgtgattgagaaaaggggctggagactgttcctgaggactcagtattggtgtgcttgcactgtctataaatcagaaattttaaactgacacacagctcttctgccattcttggcacagtatggggttaaggcatgaactggtggtttgtcaccaactgtgggacccaggctatagctggatgaggactttaaaagggtgccttgtcacctgcctccagtcccaaaatctcttccagcatctcatctcccgcagagggcccccagccccagtttacactctccccatgctgggacactcactacctctccaggaggttcttagtttctaagaacctttggaatctcagagtctttccaacattgagggtgcggaataaatgaatatatcatcaaatcatcaggactttttaaaaggtaaggaaaagaaaagagagaactcccttctaccccagcaacaccctcagtgcctttcactgggtgtcccgccccctccctcccagccgtcctcacctgaagagcacactccaggtgtggtggaatcccggccagcccacagcctgcatgcagaggagccctgtactgtcagtgagagggggccagtgtgggtacaggcacttcagctctctgaagtcattcactttccctagatctccttcctgtgctacaaaatgagacactgggcgaagaaccatttcctgccaatgggcttgtgtaccgatgcccagaggaaactggagcaccacccacctgcagccgcaggctcccctccccatggccacacccccttcctgctcctctgggaatgcacggggcttggcagaggtgggttttaagccattgagagaacattgttggttctgcccagctatgaaagtctataggaggaaaagatagaatataagcaaaatacccttcgtcgttattctgtcactgaagctctcagtgcacagcatagtgaggtctgcagggaagcatggccccttctaagagggtccttgaccccaagtcattggaaggcagagaatagaaaaccttttcagtgttcatgcagacccactatatcggtcatcatcacatgcatgggagatagaaacagaaacgcattcctggaaatcattcccccagattcaggtgcaggggcctcgattctacctgtgatgcttcatctactgtgtggtgggcacaaggtgtttgcttgtgatctcatctataccttttgccagaaatagttcacacttttagaactcctattaaaagtaagaaaataaagtctccagtacttgacaacaggattccattatattttcattttgtattttactgggaatccaagtatcacatatcatcatggctattttagagatatggttaaaatgatcacatcatgccccattacttccaaacctttgccagtgtttctccctctgcataggatcacctaacaaactcctatgcatccttcaaaacccagctcacacctcacttcctctgtgaaatgactcctgcatctacccacagaagtgatcacatcctcttctttgttgctgcctctttggcttgcatggtcctattaccaaaccgtcctgctcacactagaataatctgctcacactccagttaactgtaagcgctttgctgcctggaatcgtgtcttatttttctctataactcagtaaataaatattcaactgagggggagctctcctgcccagggctatatgtgttcttgggccattctgactgacagcaaatttcatggccatggatgactataaacagtgtccagctcccattaaactgattgtttactattaacatgcagcaattagcagcgagtccagatcatgtgctgcttccaaggctgataaccaacccaacgagatgtcccaaaaagacagcttcagaaacaatcactcaaattcttatgcaaaacagtcacctcataaaggtcagcagtctcttgaagttcagggtcctgaaccagacacctcctgtattacaatgaatgatgtccacctgtacagggaggtgtggctgccgtgccctgaaaagtatcctgtctccagagaggaatgatgcttacttgggaagaggtcactttcctcaaagaaggagccaggtttgcccgtggtaggagtcggtggggaacaagtcctggcccagtgcctctgcccaccaccactcaatgtgtctggtcaacctgtgtgcagggctccagagtcccacctgcccaggaggctgcaagttccctcttttctgccaccctggctcggctgggcagtccccagatgtcctgcccttcacctcccaagcagagatcacatgggagcgggtgtcacctgtcaccccagtagactgcgagctccctgcagatggccaggcagggttttagccatggccccccaggactcccccgagaggctggcccagcaggcatctatatagggaacatgcatcgaacacatgccactgtcagttcatgagttttaaaaacaaccattatggttttataaaagcataaaataaaatctcaaacaatctgtgctagccctgggtctagctcacagcaggtgctcaccaaatggagtgcccggaaaatatatagcctctcttccgtaattttctggcaaaaaaagaaagaaaacactctcctttatctcccagctgcctgaagcttgatgcgaaagggccactgagaaggccagaaatgggccactcctacccaactgacaggaggaatcgtgctaagaaaacagcctggccccagtgagagggcttggcagacaggcatgggagtaaacaaacctaccaacctccggggcccctggggtctcaggaactgcgggcacccagcctaggctggtccatcggcccctgttctcctagttgagatcctgaggcccaaggccttaagctgtgccttgattcctcctaccttgtcaaactagttcccaacagtggcactctttcaaaaataaagttttaactcttattaggaaaggaatgcagatccattatagaaaatgaaaaatacagccagacgcagtggctcacgcctataatcccagcactttgggaggcagaggcaggacatttgctttagctcaggagttcaagaccagcctgggcaacatggagaaaccttgtctctgcaaaaaatacaaaaaaattagctgggcataggtggtcctggctattcaggaggctgaggtgggaggattgcttgagcctggaaggtagaggctgcagtgagctgtgattgcaccactgcactccagcctgggcgacagagcaagaccctgtcaaaaaagaaaaaagatagaagaaaaataaaaaggaagagggagggaagggacagagggagggaggaaggaaggaaagaaggaaagtggaaggaagggggagtgggggagggaggaaggggagagagaggaagggaaagaaaagaaagagggaaatgaaagaaaaagaaaggagcaaaggaaggaagaagggaaggaaaggaagaagaaaggaagggaggagggaaatagaagaaagaaggaaagaaaagaaaggaaaggagcgaaggaaaaagggaaggaaaggaagaaaggaaggaagggagggagggagggagagagggaagaaaggaaggggaaagagagagacagcgaaagaaagaaaggaagggaggaagaaaggaaagaaagaagaaaggaaggaaggaaaattaaaaatacaacaaagaacagagaaggaaacagaaagcccccatgatgtcaggatccagaggcagcccctgccaacctgtcacctgcttcccctcattctacttctgcaagacagagtcctgtttgcagccatacatcctgttttttaaccttctgtgttcactttcccaagtccctatagcttgtcataaatgcctgagtcattgtcctgactcagaaactcgaggcagcaaacgcggatgcaatagaccactggcagaacacacacggtgccatctgatgtgtacgtaagatttgtgcatgcttttgcacatttccttcggtagactcctggaagtggaattagcacactaaagggcaggagcgtgcataaagctgttgtttgcacagaggcggggggcgtctgctatgcaccacactgcacaggctctgggctttcacagtgaacaagacagactcagtccctgtccttacagaacttggatcctagtaggggaaaacacacaagaaataatcaaagagagagagagaaaaatatcagatgagaagtgctgtggcaaggatgggaaaaggtggcatataactgagtgactcggggctggcctagatgatgctcaggcaggcctccctgaacaagggacactgaggtgggagctactcagtgagaaagaaccagcggtgcaaagatcggggctggagcgctcccggccaaggacacaggagtgcctgtgcaagggccctggggctgagaacaacctgccaaaggcacctgctgtcttctcttttgacacttaaattacaccctacctttaaaaaaaaatcctggctaatttgattgggtatgatagcatcctgctgttttaatttgcatttcatgaccggtgaggttaaactaatttttatatttaataggcattgcttttctttgtgaactgtgtgttcccatgccttgactaattataaattcccattgttcctcttgtaaacttgacaaactttttatacactgaggatgttaaccctctgccacattgtttaaagactgtttcccaggctatatcttcactctccatttttctaaaggcctgcatgccatctgtgcatcaaatactctgttgaggaaactgggggtaaaataatatttgtcattatcattataacaaattcattttcagatcccattggacattgcttttaatcctgtatcattcagaattgagttttgaaagaggatccatggcctgaggctgagtataaaattcccacataacttttaccctgtaaaatgggagtacgggttgagtatcccttatctgaaatgtttgggaccagaagtgttacagatttgagggtttttggattttggaatatttgcacatacatagtgagatatcttggggatgggacccaagtctaaacatgaaatccatttatgtttcacatacacttatacatatagctgaaaggtaattttatacaatatttttaataattttgtacatgaaacaaaagtctgtgtacattgaaacatcggaaggcaaagttctcactgtctcagccacccaagttgacagtctggggttgtttggcatcaccatcattcctgacaatgaatgtatttatttattcaagacagactctctctctgtcacccaggctggagtgcaggggcatgatcgtaggtcacagtagcctcaatctgctggcttcaagcaatcctcccacctgggcctcctgagtagctgggactacaggggtatgccaccatgtccggctaatttttaaattttttgtagaggcaagacctcactgcccaggatggtctcaaactctcagcctcaagcaatcctcccacctcagcctcctgatgtattgggattacagtcatgagccatctcgccccgttctgactctgaatttatatgctaccaataagtaatcacttcttacacttattcacacataccactgatacagtggagaagataatgtgctcatggtaacatgtgagcttgcttgcatggggagtctgggtgtgtatggaagctctatcacagctgatgggggctagggggatcttttttccccttgggtatgctaaatacactgcgttgtacacctgcattttgactgcgatctgtcacaggaggttgggtgtgcaattttccacttgtgacttcatgttggcactcacagagtttcagattttggagcatttgggactttggattagggatgctcaacctatttctataccacctttggaaaactccataaggatgggggaagctttacagatcacttccccattttgcaacaaaaaatgcaataagaagcgttcattctcatcatcatttgacaaatggtgtgagtcaaccattccatgggaaaagccaggcccacgcttccttaggcagcttggagaaacgcaatctggttcccttgatcaaaagcacccaagaccaggatgtcaggtttttgtctggctttgaatatttcagaggtagtgaaagctctctccgtggaaccggaaagaataattaaaatgcaatgccctttatggctcacttacattgtgggacagaaaagcggtaactgtgacttgaatcagagataacaaaagtgtagtgtcgagtttggagttcgagaacatggttctgatacgcatgagtctggtttaacaaggtgctgtccaaaaccacgcctgcctgagcacactttacacaactaccacccaggtcagaaaagaaacattcctcgtcgcgtgcggtggctcacgcctgtaatcccagcacttcgggatgccaagacaggtggatcacctgaggtcaggagttcgagaccagcctggccaacatggcgaagccctgtctctactaaaaatacaaaagaattagccaggcgtagtggcaggcgcctgtaatcccagctacccgggaggctgaggcaggagaattgcttgaatccaggaggtggaggttgcagtaagccgagatcacagcattgcacttcagcctgagcaacaagagtgaaacttcatctgaaggaacaaggaagggagggagggaggaagggcaggagggaaggaaagaaagaaaagagaaagaaaagaaaggaaaggaaggaaggaagaaagagagagagagagagaaagaaaaagaaagaaagaaagaaagaaagaaagaaagaaagaaggaaaggaagaaagaaaggaagaaaagaaagaaaaagaaaaagaaagaaagaaaagaaagaaaggaaaggaaaggaagaaagagagagaaagaaagaaagaaagaaagaaagaaagaaagaaagaaagaaagaaagaaaaagaaagaaagagaaggaaggaaggaaggaaagaaagagaaagaaaagaaagaaagaaagaaagattgattcctgatgctcgagaaggctggctcctgccgcttcctgatcaaccccacacccggaggtcatccacactcttattctagcaccttagattagtttttacgcttcttaaacttcatgtgagtaaaatcatatagtatgtagcttttgtgctcatcttctttggtttggttctgacaccacggctgggaaattcattcattttcttgcctgttttggaaattcattttttcccagtgctgtgtaatatcccattgactaaatacacctttatccatcctattgctacatttattgctcacagagcatgttttctatccttttccttcagggaaagtgggtctttatatttaaagtgtgacttttgtatccactctgacaatttctgccttttaactggtttagtccatttacatttaatgtaactactgatatgactcctttaattccaccgttttgctgtctcttctccatttgtctcgtctgtttttttcccctgctttggtccttctttgctaccctcttttagtgcaaacagatttctttagtctctcattttatttccccatttgctttttatctgtgcctccttgtgctgcctttttaaaccttgatttgtcacagcctccttgaactcatagcgtcacgcaccccctcagacaagactgaaggactgtgcgagagcacagatccattttccaccaaccacccccaccccatcctttctagattgttttatgcattttacgtctgcatatgtcataaaccccacaatacaatctgattcttttgctttaaacagtcacttgtgttttgaatacactgagaaaaagagatcgtctcagacattgactctcctttacccacttctcctgttctttattcccttccaagagaactaaattcctatctggcattgtttctcttcacctgcagaacctcctttagcatttttggtggtacagcctctggcgacaaataatcttagcttccttttacctaaaatgtctttatttcactcttattgtaaaataatattttttgcttgatgagaaattctgagttaacagatgtctctgtttcgttttagggcactttagtgtatgggatgctaccgaggggcacggctgctccacgtccttgccatttctcagcactgttagctttttaatttagccatcctggtgcctgggcagtgttgtttcattgtgtgctgttcttcctcttataaatatgctccttttaaatgcaaatacaagatccaccattaaacttttatcaatcctatttaaatttccaatttttcttgttttaaacattttagagtttaatttataaatcatgaacttcgccgatttttagtaagtcttccaagttgtggagccatcattataatctgtttcagaaccttcctcgcccagtaaggtccctcacactcatttacagctaatctccattccaactagtccccgtcagccactatagatttggatatatagatttggctattctggagatttcatacaaatgcaagcatacaatatgaggtcttttgtgtctagcttctatcatttagcataatgtttctgaggttcagaaatgttatagatattgaagcatatatcaatatttcataccttctcattgttgaatcacattgtgttatatagacatgccacatttatccattcaccaactgaggacatttgggcttctcccattcgttgactattataatgctataagcattcatgtacaaatctttatatagatatgtgttttcatttctcttgggtagatacttaggagtagaattacagagtccgtaggtgtcctttttttagactttttaagaaactacaaaaccatttatcaaggtggctataccattttaaagtcctatcagaatgacggtacccattcctccacatgctagtcaacatttactattgtctgtttttttttaatagtcattctagtggatgagaatttatatctagttgtaattttactctggttccctgatgatcaatgaggtagaacaccttttcacatatttgttagtcatttaattatcctgtttttgaaatattctttcaagcttttgcccatttttgagttttcatattattttatagtttttataatctgcacaaaagttctttgtggttataggtattgaacatgtcttctctcagtctgtaatttgccttgtctctcttttattagtgtcttttgatgaacaatgattatttcatgtccaatgtacaaccctctctgaatagtatatttatgtaaatagtgtactgtgtcctgcttaagaaatatttaccatgtcccaagatcatgaaaatagtctgttttctactagtagctatattgttttactttttacatgtaggcctatggaccactttgaattaatctttgtgggtagtatgatatagacttcatactctatatacagagagtgtgtgtggtgtgtgtgtgtgtgtatttcctgtttttttttcttacagatagctgaccagtccaatattgtccattgaaagatcatcctctctatagtgaactgccacggtatctttgtccacacacgtgaagatgtacttctgggctcttctgttccattgacgtgtctctctaaccttcagcctactgtcttgattactgtagctttgtagtaaactttgttataggttgtatgaaacctccaatttttctcttcttcaagattgtgattccacatcctttcaatttttacatcaaatttagaatctgcttgccgatgtctgcatttaaaaagtctgctggtggctgggcgtggtgactcacgtctgtaatcctagcactttgggaggccaaggcaggtggatcacttgagatcaggagttcgagaccaacctggccaacatggcaaaaccccatctctactaaaaatacaaaaaaaaaaaaaaaaaaaaaaaattagccgggcatggtggcaggcatctgtaatcccagctactcgggaggctgaggcaggagaattgcttgaacccaggaggcagaagttgcagtgagttgagatcatgccactgcactccagcctgagcaacagagcaagactcagttaaaaaaaaaaaaaaaaaagagtctgctgggattttggtaagggatagcactgaatctgtagatcaatcatggaaaaactgatatctatactaagtcttctaatcgatgaaaacgatatccctttccattgatttagatctccttaagtttttctcagcaatgttttatagttttcaggggagacatcttacacaactttccttagatttattcctaggtatttgaattttgtggtgctctactgtaaatgatattttttaagatttcattttctaattgttcactgctgatatattgaaacaacttatttgtgtgtatgtaccttgtatatgtagactttgataaactcacttattaattctaatagtttgtagggtcttgccatgttctgaatgtgtctcacaaaaattcatacattgaaacttatcatcagtgtgatagtattaggagatggggtctttaagaggtgatgaagtcatgagggcaaagcctttatgaagggagttagtgaccttataagagaaatatgagctgcctgcctctcttttgtcattccactccttctgccatgtgaggacatggcattcaaggcactgtcttagaagcagaaactggacccttgccagatagtgcctagatcttggacttcccagcctccagaatggtaagaaaaaaatttctattatatataagttacccagtctgtgttattttgttatagcaacagtaatgaactaaaacaggtgtcttgggtttgctacatcacaaccatagcacctgcaaataatgagtttcccttttttctccctctctaaagactttttttttttttttttttttttttttttgagagggagtctcactctgtcgcccaggctggagtgcagtggcgcgatctcagctcactgcaagctccacctcccaggttcacaccattctcctgcctcagcctcctgagtagctgggactacaggcgcccaccactgcaccccgctaattttttgtatttttagtagagatggggtttcactgtgttagccaggatggtctcaatctcctaaactcgtgatctgcctgcctcggcctcccaatgaaacttttatttattttattttattttatatttgacatcctggccaatgcaatgttgactagaagtggtaatagtcaacatcttgttttgaccttgaacttgggtgggaaatgttcaatatttcatcattatgtatgttacttgtaaaagatttttgatagaaccatttatcatattagagaaattccattcttttcctggttttcggagagtttatatcatgaagttgaattttaccaacagatttttctgcatctattaagatgactgaccacgtttttcttttttatcatattattatgttgaattatattcagtgattttagaatatgaagccaatctttatattttcagaataaacccagctgggttatgacttattagccttcctatgtattgctggatttgatatgttaatatcttgctcgtactcttgtatctatgttcataaaaggtaatccaaaagttttcttatcctgtaatgttattgcttttggaatcagagttacactggcttcataagttagttaaaatgtgttcctaattctctattttctggaagactttggctagaattagttttacttctttcttaaacacttgaaagaatttacttgtgaagccatctaggcctgggcctttcttcataggaaaattattcattacagatttaatttatttaggagctttaggactacttagattttctatttgtttcatgtcagttttggtacattgtgcttattcaaggaatatgttcattttatcgaggtttcaagtttattggtatatgctgtttgctgtggttttattgactgtaggagctgtggtatttccccctttacatttttgatattagtaatttattgtctctgttttgctttatcaatattgctaaatgtttgtcaatttatcagttttaattaactcttgaatttgttgattttctttattgattttatttcactgcttcttgctctttaaaatttccttccttctactctctggagtttaatttgctgttctttttctttcttcttgagatagaagtttagatgcttgattttcagcatttcttctttttgtctaaaatatgttttgctctaaggactaattacaacccacaaattttgaaatgcggtctacaatgataaaagtatgtcatgtccacagtattctgcagttgtggaatagagtgctctgtcaggtaagttcacgttggttaattgtgttggtgaaatcatgtctttattcattctttgtctgtgtgttctactgtttgctgagagaagcgtgttcgtccccaaccgtaactgtggatttgtctgcttctccttttagtgttgataatttttttcttttatacattttgaggttttgttattgaatgcattcccactgaattgaccctttattattaagaactgtccttttgtgtctttagtattacttcttgccttagagcctttgacattaatacagccagaccagctttgcttttaggaagtgcttgcacagtgtatctttccccatcctcttatgctccatgtcaccatgtcctcataattaagatgtctctcttgtaaatatcactgttactctttgatccagtctgaaaatctcagcttactttacttcttagcctcctgccccacacagcttcaaagtgtgacaaacgccctgaggggcagactggtcatgtgtttgtggcgggccccctccctttgtctcctacgtccagtgagggcatgggagctgtcattctgcctttccagctgggctcgccagcctcccccttcactccaggactcaggaggatctcctgtgcagcaagctggcctaggtggggctcctctggtttccattgtttcatgcccactctgagatggcagaaaagtcctactcatctctctgaggacatccaatcctcagcccgcacccagaatccacaaatgccccaagggaagaaagcagctggcaattaggccgcccaggcagggctctttccccttccctttggaattttagttcatccacactccacagcttccacagatctccagtatctttcaaaacaggactatttgcaatttatatgtttcccttgctgttgcagccagttggccggcctgccctgacctgtggcatcttacctggagatggaagtctgctcatggttgttgaagtaaatgaatcaataaatgcccgacacttagatacgctatcacgaggcatttgcaacaaccctcgctagtctccattaagctcctttgacaaatggggaactgttctttgagcggattacctgcagccccaaagcctccttaccacacctaagacgggagggaggttgctggggccccagtgctttgaacaatgcctggagcacagcaggtcctcggagctccgcatttcccccatgcgtgcagggagggaaggccgcgtgcccgcgggcgggggagggggcggcacgtaccagcctgcggatgtcgcgctcgcactcgcgcttgatgcggtgcacctcgtcttggtgcgcctggtaggcggcacgcaggtcggctgccttggtcttgtcagcctgcatgcagttactgagcgcctcctctgcctgcttgcgcgctgccttgagctccaggatctcctgctgcagccgcaggcgctctccatcgaaggccctgcgcgcctcctcgcgcgcctcggtcagcagcgccgtcttgaccttgtcggccgcgccgtcgcgcagcacgttcagcgtggcctgcagccgctgcagctcgccctccttgatcttggcggtgcgcgccgcctcctgctcgtgctgccggatgagcccctcgcgcagcgcctgcagctccttggtcttctcctcatgcagcttggccttgagctccgaaatgtaggccgtgtgccgtcgctgctcctgctcgcgctccagcttcgcctcctgcagccgctcgcgcagtttgcccacctgcagccagagcggcgagagagccggtcagggtcagggtcagggtcagggtcagggtcagggtcacagctgggggagctggccacagcctccccacgcccaagacacccacctgggcccacgttcccatggattcccccttcggcagtgccctgcaggcctgaccctcctgccagccccacttagaatctctcctgctagttccctgagactttccctgggggtggaaaccccctgaggatgctggagaggcattcaagcctttgacatctcttccaggttgtaaattgagacgactgctcaatcacaaaacacaccctgcagaaatcatcaccaagacccaaaagattgtaaaccagaaatatatttccagggccccatgcgcggactgtggagttggaaaagacagaccaggcttctaagtcctggggggcagtgagcagggggcaccattcttgttgagtggggtccctagctgggctgggggctccaatgcatcacccacattgccacatgaacccctcacggtcttgggaaggaagtagcgtgctccctctctttctccctctctcctctctctctctctctcttcctctctctctcctctgttttatcatgaggcagccaaagatcagagacagtctggtgagctgcccagggtgagggatgaggaccctgtgctaccaggcaacccaccccgccttgagcctattcattttatcagcaaacaattcaaaacattacttataaaacgtcccaagggagtgtgttcttaaaacacttcaaaatgctttctttaacctttttgtttcaaatatcactcaacacacattccacaggaacgcctgacaagcccttatttcctgaattctgcccgtctctgaagacctgaaatgaattgcctctggtggacaagctgcttccagggaaaatggcaatgtttttccccagaccacactgttgatagcatagtcacatgttaaaattaattttaggtgagaagttttacaatggcacctgagtattgataaatccttacttaaaacagcaggtaaaaaagcaaataaaaccaacccaggcaaacacacaagatcaacatctcctttcaccagatactcacaatcataggaatgaagccaggcgaccagtccatgttctgtccaccttaccctgggggcagcaatcagcatcttttcctagtggatttagcagcaggaagccagaactttaagtatttaacagaattgtcccagttatggacaaaatggttttgactgttctccctcctgcgaggcaacagtcaagtccctggttaatgccgacagccatctggggccagcagggtcagatccaatgagatcctaatctgctttgatgagctgcgtttccccaggcaaatttctctgcctctatggtggctgatgttgtgggtcgacttggctgggccacaatgcccagtcgtttggtcaaacaccagtccagatgtggctgtgaaggtacattttataagagattaacatttacatcagtagactctgggtgaagcacggtgccttccacaatgtaggtgggcctcatccaatcagtcgaaggctttaagagaagaccgaggtcccctgcggaagaaggaactctgcctcccggctgcactgggactcgaagctgcaagatcaacccttgcctgaatctccagcctgctggtctgccctacacatttcagatttgccagccccacaaccgcataagccgattccttaaaactaacgaataacctctcactctgtggggggtgtgtgtgtgtgtgtcacaacctattggttctgtttctttgaagaaccctgactacacaaccttccagagctccagtttcctctactaggaaacagggatggcaacagctgcccctcaaaggcccgttgagaggaggaagatgaggtgactgtgggtgggtgaatggaagtctgttgttatcgtggttctgactttctgcatcaggggtgggcagcctcgtgtgagagacacaggtagaaagggggtgaggaacatggaagggtgggcagaggcctgtgcagggcagcccggggcgtctaggggctgcttcctgggaggggcagaggtgctgctgaggctggtgatccaggtgtgtagggcagggatggtgacagagaggcaggggcctggggacagggccctgctgggtccctccagctctgcccaaagctgctgagagccaagcccaggtgacatgacctatgccacagaagcagcagagtgaggctggggtgacctctgatgggcacagagcactccctcccaccaccactccatccagctgagcaggccaaaaaaagccgcccagcactttacctccaggtgcctccaagctaccccaagtgtagaggcacctacaccagccgctcctcagcacttggactctaaatgcagccacggcacaaaggccaagagagggagcatgccctgggggtgtgggggctggcgtggagaaattatctgaaccaccagcaccaccctcacttgccactcccactcagagagtgagtcagattcacccctttccatcctcatcctcatccaatccagcagcactggctctccatgtccaggcctggccacttccccacttcccccttgcccaagccacctgcagcagccctccccgccacaccctccatgctcaaagccctctaaatctcatgggtaccagttcactactctgaaaccatcatacatgtatagtgttgaacaaagaaagtggatggcagagggggaagccaggtttcccacttggagtaagaggttacagacaagcaagaggaggctgaagggagccatgcggcagtggatgcgtcttgggacatctgtaagaactcatgtttgactttgtatggatatagatgtcatatatggaaatatttacaggtatgcgtacatacgcaggtcagtatacacatatatattccttgttctggcagctgagagggcctagaaacaatgacaccgcagcagtgatgggcacgcctggtgcctggatctttgtttctaatgccattctccaataaaaggaaccaggaccccttagagaaactgctgggtctagcgctggggtaggaaatatacaagatgtgcctggggcaccttttttttttttttttttttttttttgagtcggagtctcgctctgtcccccaggctggagtgcagtggcacgatcttggctcactgcaggctctgccttccaggttcacgccattctcctgcctcagcttccagagtagctgggactacaggcacccgccactgcgcccggctaatttttttatatttttagtagagacagagtttcactgtgttagccaggatggtctcgatctcctgacctcattatccgcccgccttggcctcccaaagtgctgagattacaggcatgagccactgcggagcctggggcatcttataatgccagaaagtaaggaaatgctccacaaaacccccacaaaactgcccctgtgaagccttgggttctgcttgtccctgcactattttctaaaacctctgatggaatgtgcccagggctgctgtattgctggtttcctgtgaggctctgtacccatgcgacttgaggacagggtctgtctctgagttacttccaaacacttctcactcagcccaggcatggagcatgcatgccaggggtttgcagatgaatagacagacacgtttaccaccctccttcatcctacagtgttcaacagggatgctttgctaaaatgccagcactttaaatgggacattgacagtgattgtgagatcatatcaaagtaacacttcaatgcaattgtaaagtttgcatttatgttttttgtaccagtcaataagcacattactgaattctcagagaattgaaattctcccagcagccagatgggtaaagtcaacctgaagcggccacatggatggctggattgagaaaataatcagccagcgtgcatccaagtggaaattgccacacgtcccagaggcagggaggcagcctggtaacagggaggcccagcctggggtccgcatgggcctggctttcaatcctgcaataccacctactgtgctggcctcgtgtgtggggctaaactgtgtccccctgaaaatcatatgttgaagtcctaacccccatgacctcaggatgtgattccatttggagatagatcctaatgaggtcattagggtgggccctaatccgatttgcctggtgtctttgtaagaacagaaaatacagacatggacaaacacagaggagaaagccatgtgaagacacagggagaaggcggccgtctgcaagccaaggagagaggcttcagaaggagccaatcctgacacctggatctgtggctgccagcctccaggactgtgagacagcaatcgtctgttgcgtaagccgccctatctgtgggacttggttactgcagccctggcaagctaacacacctgggcaagtccccgccctctccagcccttggcttgctcacctgtaacacgggggaagccacacctgatctctcaggtcactgccagggtcatgacaccctctaaagcacctggtgctatctgcacagtaggcatgtaaaggtcaccctgatggtcatgtgagcgtatgacaggcagcacccaggccctgtgtgtgactgtctcattcattcctcaaacaacccaggaggcagacaccttagaggtccccatctacagatgggaaaactgaggcagggggttacacagcttataagacctcaggcaggggtggtggtggagaggggatttgagcccaggcagtgtgatatgagtgagcagctttccctgtcaccacagctgctgtagctatgtccagatacaagctgccagcccttacacccccagccagtcagccccagccccagccccggaggtgacctggcctgttgacctggctaaagggtgaacaggtcagcatcaccagcatccatgtctaaaagaggctggatgcactcggcctggaatcttgaacacctagggatggagacaggtgcatctgtccccaagttccagaagcccagtcccctggtccagaactcagcctctgctctgtgtggccatcctgagctggggttgcagccagatcccaggccccagccccgtccccacctggaagctggatctggcccagcactccattggcgacctgagtcccagctcaacaagacagggacgcctgctgcaattccccaagcagcctccacccgtcactccaggtactacagcaggagccagagggcaccttcggggcttcagatagaccttcaactgctcgagccacccaggagcaagcctgcatctccatgctctttctgtgctcagcctggctggcagctcctctctgggctcacagaaccctgggcttgctctaccctcaagcccacccaagtcagaagcaggccaccaaataggactgcagctgtgcctgggcaccagatgttgatggggctttttattgcatccattaatcagatcctcatgaccatcttaaaccggacagctataattacaccataatagctggtgtcagatgagaagacagaggtttcggagacttttagtcacctggccaagatcatgagaccagttagcggacaagctgaggtttgaaaccgggtctgcctagaaagcctgtgctcctcccctctgtgacagcccgtgctttaattagactgccagcacccaaccaggcactgtcctgaccagctccaaagctcaaatctgccttaggagagaggaaagtagctcatatcgcagaaccaggctctgttccaagctctttacctagcagagccctgagtccagaccacagccccatcacatctaagaaagcacatatatggcttacaagacctcatggcagcataaaccaaaaataaactttgaagcctcctgaccatctgaacggatccctcctctccaccaagggtcttccaaagttaacctgaaaagctagttcaggccatgatgggaagcggggaagtgggacatacctcactatgccctactcccttttggaatttaggaaaagctggtaccgccatgaccctgctgaattcagcctgaggatgccttcatgcatgagttcctatatgatgaactgcaacctaacttagcaggcaaactaaccaaaagcctgacttaggagcatttttaaacaaatagccgaagctcagccaatcacagcagctgagcatcagtaaatcacaggtgacccatggatcaagggtcaagctgtaactgatcaagtagcctcagcacctcttctgttttctgtccccataatgaatgctgtctgaccacatgcaggtttctctgaacctgttctgttctggggactgccccatcctcgaatcgttctttgctcagttaatctctgctaaactgaatttgtcaaacatttttcttctgacaacccccatcttgcaggtaagagaaatcaaagaatgaggtgttcagtggctttttgaaggtcacagcaagcactggtagggcccagactcctgcccagcagtctctgtactgcaaagggacagacagcagggcagagaggtgaagtgccccccctcggcccccctcctggaacaggctcttcacacacatgcctcagaggcaacactgcccaaagggacatttgcagcccagccgctgctgagctgacgccaacccccaccttgcttttttcctgctggaactcgatctgaatgctggtcagcttggcccgcagctcctcgttggccatctgcaccgcgtccgtctccatctcgggcttctcgcccttgctccggcctttcttcgacatgcttccccttgggtcagagtgctgagatcctgcggtccacacctgttcacgcacgccagccagcaggcgtggctaccagctccaccgtgctaaccagtcgcgcaggactcagctcgccctccgaggaaaccaccatcacttgggatcctgaaggaaggagggaaactgagttagcagagacagaagggtggggagctggtgtccctgcctcgggcaccctgggccaggcacctgcctcatctggagcatgacctgccactcccagactgacctagagccttcccgatgggggctgcagcagaatcgcttggaggttgttaaggcgtggagtcctgggcccacccctagagaatctgatttgcatttctaacatgctcctaggtgaggctcccaggtgaccacacctggaatagcttcagtccatcctgctcccatcaggatgagaccagcccatctcagcagcctgcagaccatggtctgccaacatcagtgagcctgtgtctcccaaggtgcttcttccaaaaagcagggccctgggcctcatccagagcttgaagcatgaggagcatggtggtccagggaatctgcatttccatccacaatcccagcaattctggagcagggcgtgaggaccacacttagagaaatggacttttcgatttcagaggttagtggtttccttccctactaggtaggtgatatcacccagtgttacagatgaggaaactgagacacacagaggttgactgctggtgatgtcactcaactactgagagaggaaatagtatgaacctgatcaaggtccacagctggaagcgggtgagccaggactgagcctaatcaccgccccaagctgcctcggaaagcccgcctctgctctcccttcccttcaccacgtctccttctcgttttccatctgacaaactgtaattgacttagttctcatctatgtcccctacacgaggatgggttcccagtaagcagggcctgggcctgctctgcgcctgctgtgtcctccatgcctagaacagagggcagcacgtaaggatgcattccatcaggatccgccaggtgcgtgaatgaatgagtgagtgagtgacagcagaagagtcatgaggcacccatcatgtgccagggcctgtgacgggagctgggaatcctgtcctatcatctttggaacacctggtgagagaggattttactaggcccattttagagatgaggaaatgaaagcacagagaggtgaagtcagctacctaaatccacacagtcagtgagtcgtggcgttgggattagattatgtagggaatgaatgcagagcgaggagggaacactccagtgtcaaggaatgctaacttgggaggttgggcagatgagacaaaattggcaaggaaggccatgaacaggacagaaggagagaaagcaccagggaggctacagaagatggtgtgtctagaagaaggaagactccaacagcgggcagccccaaagaggtcaaggtgaggacctgaagctggacattggatttggcctcctggagtccatgtgacctcagcctatggacaggagatgcagaaagtacaggacaggggtgcccagggatggtctggggtggggtctccacaacaccagtgcatccagcaagttgcagatgctcggtggccatgaactgaagtcaggcgggacctgctagccctggggccctgggacatccctccaagctacaaaatctgggaggcagtgatggaggtcagctgctttcctcctgaacaggagagaggggtgtttcttaacacaccatgaaggattattctgggctaatcaacatcaccgctgatcgattccagaaaggtacattctgtcttcagacaagtatgaactccattcgccttgatctgacttagagcttgatacataattcattcctcacctcggctgacctgccgcttttataaccacagcagttctcagaaatcagccttcgagtctgaagtgcacctccccatgccctgatgggcaggaagacacagaaaatacaacaccaaaaaaggaagcttgctcctttttattcctttctgtggccacttctaggaatgtgctttaaggaaataccagagatacggtctctgatagaaacacttggatgttcatcccaacaacacaaggctcagccagaagggatagattaagtaaatgatgtctaagccccgacagaaaagtccacatggggaaaaggtcagtaccacaaagagtgaaaaaggtgaaataaaaaaacaggctgggtgtggtggctcacacctgtaatcccagcactttgggaggccgaggtgggcagaccacctgagatcaggagtttgagaccagcctggccaacatgatgaaactgcctctctacttaaaatacaaaaaattagcagggcgtggtggtgcgcacctgtaattccagttactcaggaggctgagacaggagaattgcttgaacctgggaggcggaagttgcagtgagccgagatcgtgccattgcaccccagcctgggagactccatctcaaaataaataaataaatacataaaaataaaaaacaaatacaatttatagtttcaattgtctgctatatatatatttgctcattattttcactcagtcacaaatatgtgttgagcacctgcaaggtgccagccctgcaccctggggatacggtggaaaggacatagcagccacgcccccaggatactgacagggaccacctgggggatgcaattataggtgatatctattctcttctttagactcttctaggtaagtacaatgttctacttcaatgactgcttttaagaggaaacagtgcagttttttcgttttgttttgttttttaagaaaggcaagaaaaatatctgcaattagccaggaaggacaccactaaaaagctgaagagaaagcaaaaggaccacatccacaggagcagcccaccggcctcgcaggcaggatggggcggctgcaggtctgccaactctttgggctgccggtgggggaaagggctgccctgccctgtatgtcaagtgtcagctcctcggggtcagaaccttagctcccacctttgtgcaccctaccccgtgcccagcccaaagtccaagctcgatccgattccagggtgaataaatctccatgggctgataccaagcctggtactctcaacaccccatgccagacactgccaggctgggccacagtgagtgtggagacgaatggagtgcaggaggggaagatgtccaaagttctgggccaagtcaatctcggagctcagggtgggccccagcagccggcctctgtgccatggacacactgttgatagtcccgacgctcacagcaccacacagcatcactgtaatcagcccctctggctgcgggctgcccaaaggtctcatcagcaggagcaacagcagggaactctcctgcctgagcttagcttggtgtctgctgcgcccggggattttcgttctgagcccactgcccaccaagcaggagatggcacagcccactgtcgaggaaggagcacagcactggctcagcgccgcaggctggaggatgactgctcaggacacacaggaggcggagtcctcagagaaggctccttcctgaaggcacggggaccttggacctgctgaccctggaccttgtctggcatataggccaaggttggcaaatattcatctcccgcaaaccagtcctgttggccccagaactgaaatatctctgcagcccacccatctctgacatcacatgtcccctgtcccagcctccaagtcgtttgtctgtgccttggcagtgccggtgccctttaactgcctacaggaaattaatataccgggcatgcaggaggaccagacaaggtcccagccatcacagaacggtctagtcaggaacaccactatggaaatgaatacataaaacaatgatggcttgtggtaggtgctggaaagaacaagtctacagggcactgtgatacacagctatcaaatatcacctgtcacgggcaggcggtggggagggcaaactgccagaccacgtgggggttctacaccaagcacagagtcaagaccagctatgtatttgcagcccagtgcaaaatgaaaacgtgaggctccttgttcaaaattattaagacttgcatgacggcaacagcagagcattaagccaagagccaggccctctgagtgtaggccctgcaggacagcacagctcgtgtgcccgtgaagctggcccaggacagagttcaagccctgctctgagcatgctgggaagccattagcagggtgtgactcggatttccatttcactgaagtgcagatggtaattatcgggggacctgccccgataatcacgtaggttcttttctatttttctaagcgtcgactggcttgagaaataaaagaatagagtacaaaagagagaaattttaaagctgggcgtccgggggagacatcactcattggtaggatccgtgatgccccacaagccacaaaaaccaacaagtttttattagggagtttcaaaaaggggagggggtatacgaataggtgtgggtgacagacatcaggtacttaacagggtaatagaatatcacaaggcaagtggagacagggcaagatcacaggaccacaggaccaggaccgaagtgaaattaaaattgctaatgaagttttgggcaccattgtcattgataacatcttatcaggagacagggttttgagatcaaccggtctgaccaaagtttattaggcgggaatttcctcttcctaataagcctgggagcgctatgggagactggagtttatttcacctctgcaatcttgaccataagagacaggtacgccccggggggccagttcagagacctacccctaggtgcgcattctctttctcagggacgttccatgctgagaaaaggaattcagcgatatttctcccatttgcttttgaaagaagagaaatacggctctgttctgcctggctcaccagcggtcagagtttaaggttctctctcttattccctgaacaattgctgttatcctgttcttttttcagggtgcccacatttcatattgctcaaacacacatgctgtacaatttgtgtagttaacgcaattattacagggtcctgagacgatacatatccttcttggctgacaggattaagagattaaagtaaagacaggcataggaaatcacaagggtattgattggggaagtgataagtgtccatgaaatctttacaatttatgtttagagactgcagtaaagacaggcataagaaattacaaaagtattaatttggggaagtaataaatgtccataaaatcttcacaatccacgttcttctgccatggcttcagccggtccctccgtttggggtccctgacttcccgcaacaggtaatagctgtatcccactggtggtggtgagggtgaaatgggtccctgcctgtcacacaggaagcattgcagaggctctgtgaccatcatcctgctgtttaaaaggcacctgggctgctgagacacagacaaatgacatggaggctgggacaaggggcatgtggtgtcagagatgggtgggctgcagagatatttcagttctggagccaacaggattggttcgcaggaggtggatattcgccaaccttgacctatatgccaggctcttggcctgaccccacagccttccacgatgcccaccaccaatatctgcccatgcactgggtgcaaggccttgtctggccttcttaggcctcctgcaaaatttcctctcttcattaaagcacagcttcgtggtgacaacattgtagaggcaagcagaaggactgggaccctggactgaggccacaggaggcaagcgcagagctctggttggccaacatgggccagcttctggccaatgagggctgaggcgggctgaatcgtggcccccaaagaaatacgatcacatcctgctccccagaacctgcagatgtacccttattaggaaaaagcatctttgaagatgtaacgaagttaaagatctcaagatgaaatcatcctgcagtaggatgaagtctaaatccattgacaagagtccttctaggagatgcacagagaagacacacagaggagaagcccaagcgaagtcagggaagagaccggagcactgcggccacaccagggaagcccaggacagccgacagccacccaaagctggagcggggaaggactgacagctttttttaagggaatgcgaccctgccagcactgtgatttgggacttctgacctctagaactgcgagagtaaatttctgtttaccacccagtttgtggtcatgctttatagaggccacaggaaattaatataccaggcatgcagggaaaaaccactcctggggccgggcgcggtggctcacgcctgtaatcccagcactttgggaggccgaggcaggtggatcacctgaggttgggagttcgagactagcctgacccaacatgaagaaacccccctctcggctaaatgtacaaattagctgggcgtggttgcgcatggctgtaatcccagctacttgggaggctgagccaggagaatcgcttgaacccgggaggtggaggttgcggtgagccgagatcacgccattgcactccagcctggacaacaagagcaaaactccgtctcaaaaacaaacaaacaacaacaacaacaaaaaaaaaccactcctgggacacagtcagcactttgtttaatgccggaaggcaaccagctcctcagaacacgagtctgaataagccttgccttgcccctctccacactgtgtgtgatctcatcaagaaaccacaatgcctcccggctgaacagggctgctcacatccctctacagtcacaattcacaacctgcaaggtgagatcagaagggacctttgcctccaaggtgcagatggaaaaagtaagcctcagaaagcagaagtgagttgcccaagattgttggatgacccggtggcagccatgggctttccaacccaggtctcctgcctccagccccacatggcctgatagttttataggaggattcaagtaacataggcacaaaaagaaaagtagctccttcaagacaactcaagtccaaataatatctgataagcagaaattccagcccatcaccaagaagtctttgtaacacttcctgcaaacttcaccaaaaattacgtggaaatcccaggggtctccgtggagaaaatatgaatgggctaggttggtagagtcaaatcctttctgtggacagaaaacagtttatcctaaagaatctagccacactttttttttttttttaacaaacattcattacttaatgagcccttaggaaaaaaatctctctctgagtaagtacatgactttgttttaaatatctaaatccaaattgattgtactgacttaaaaagctacagccatattcctaccccaggcgcagtaatatgcttcctggaaatttattctaaggaagcaattcccgaaaggaaagagcaatctgcctaaagatgttgcgagtagcatcatttgaattgttgatggcagtggaaaactggaaataacctcaggacccaaaagttattgatggctgaatgagcaaaggcacatcagcccactcagaaacagcccaggcagagacagggagggaggcccacggacaacagtggcatgtgagccctgccgggcagcacctggagagatggggaatgtgcttctcatcagttcacatcccacgattttcagtttcgtttaaaatccagtgatggtggccatgctgtttatgcaatcaacaaaataatgaaagagatgatactgggttctcttttgagcagaactgaaataccagagtgaagctcacaccccaggccagcttcagctccttccatgcgtcctttatggcccaagtggagactcagaggctgtccgagtccccactccacagagctgctggaggctaagtgccttcaggtttgggcatttcttggcacacttcctggcacaaagcaagctcaaaaaatggcagcaggccgggcacagtgctcacacctgtaatcccagcactttgggaggccgaggcaagcggatcacctgagatcaggagttcaagaccagcccggccaacatggtgaaatcctgtctctactaaaaatacaaaaattagccaggcaaggtggtgcgcacctataatctcagctacttgggaggctgaggcaggagaatcacttgaatctgggaggcagaggttgcagtgagccaagattgcaccactgaactccagcctgggcaacagagccagaccttgtctcaaaaaaaaaaaaaaaaaatggcagcagcttcatcttcatcagcatcatcattctcactggcatgtgctgccagatttgccaacaatgtccatagcttgacccaggatttttcctatgactctatcaacagtgggctgcgtaaggagcaagggcgtcaaatggtcctcagtgttcaggcccggaacaacgtgactgtttggagaccaatactctcttgccttcaacttccctctcaccttccgaagaacggtgccaggcatcaggagggcaaaagttggaagcaacctaaatgtccagccatagggaattccttgtactacaaaactgcacgactaaatcccgtgatgggtatgcagtagagaagtgtacgccatcacaacagacgtgcaggctgcccccggacctagcagggagcacacagcaaacgtgcaggaagtcactggagtgagccctcggcacacgccatctactccagtgatcgcagcgcggctccagccatgttcaagagcattaaacagaggaaccagatctgatttttccggagaaagctaacattgatttttatgtgaaattttccaatttgtatacattagaaatgaattcacataaatttgtttaaatatgtttcagcccaaacaaaagccatctgtggaccagatttgacctgtgggcatcactctgccagctctgaggtttgccacctattaaatggaaaaagcaacttatacaatcgtacatacagcatactacagtgtatatgtacatataatgtgtatatatactgcatataatatacgctgtatatatgtgcatttgtaggcaggcttatatttaagtgtaggcatttaaaatagcatagacagggccggatgcagtggctcacgcctgtaaccttagcactttgggaggccgaggcgggcggatctcttgatgtcagaagttcaagaccagcctggtcaagatagtgaaaccccgtctctactaaaagtacaaaaattagcctgtaatcccaactgttcagaaggccgaggcaggagattcgcttgaacctaggaggcagaggttgcagtgagccgagatcgaaccactgcactccagcctgggcgacagagtgagaccctgtctcaaatagtaataataataaaatagcgtagacaaatatttacaatctattgagacaggacatctttgaaagaggttagggtacttgggtttttccttcttttaggatttgatttttgcctggatacattttctaaaggaactacaaagacgctgcattgcatatttagcatgaaatcacaaaagattcttgtctttaaaagatggtgctgagattcaaggcatggcagaggccttatgaagaaaaataacataatgtgatataaatagaggttagagggagcagctgctgacctgaattcaagtcccacacaagcaagtgccggctctaggatgcgggagacgtcagttcatacccctgaactgttgtttcgtcagctgcaaagctaggaggacagcacccagcccatgtgatatggaggtcagggagggggatgtggagggcgagagcacgggctcaggagccagagtgactgggtggattcttagctctgccacttactagctgtgtgacctcagacaggagacttctgtctcctctctgtgcctcaatttcttgatcagaaaatgaggctagtaataattccttcctcctaaggttgttttgggcatgaaatggtttcatacttttaaggtattcagaacagggaccagaccgtaataaggactcggtaacagttaacaattataatgacttaattgcaaactacaaaaccctttaaacgaaagatgtcacttgttaacattctaataatttaggaaatgcaaaaggctctgttagtttttctattttctgacaatgctactagtttgcaacataccctcgaaaatgcacacctatcttgaggttgtacagtcccgtggaacagagctgttgccactggcaaaggaggcatggcttctggggggcccaaacccctcacccagagccagtgcacaccacacagtaggcaaagcccccgtcccaggggcacagcttgattctcaggattttcacgtaatcctagcagctgagctgtctgttcttccagccccggggcctaagggacacagggaactggaagacagcatcgtgcaaaaggcgaagacacaggcaggaaaatgaaaggcagcaaagattttccagaaagcaaagatttttccaccatgccaccaccccaaaagagagagaggagattaaaataaagtcttttaatacttaaaaagaagaagcctcaggctgggcatggtggctcaagcctctaatcccagcactctgagagcccaaggcaggaggatggttgagcccaggagttcaagaccagtttgggcaagagaggaagaccctgtctctacaaaaaaatgtaaaagttagctggatgtggtggtgcaagcctgtagtcctagctacccaggagactgaggtgggaggagcatgtgagcctaggagttcaaaactgcagtgagttatggtggcgccactgcactccagcctgggcgacagagcagtgacaccctgtccctaaaacacacaaaaaagaaaaggcctgggaagtctaggaaattaactttcttaggagacctcattttccaattataggaaattaacaaggtgcttgctgtctctttttatactgatgcaaaatagttagagggagttttaaatgaaacttccatgaggcgtatcaataatgtcaaccaagttaggttttcctaacacgtactctgggcttggaggtgaggtgccatagagaggacccggaatgaggagcaggaggcttagtcacttgccccagctctgccaccattcccgccatggccctggcccggctgtgttctctccacgcaggactctccatccataatgggggtgggccgtgcggacggcaccacgtggaacgagggctggcgaccattgctaatcccagagagggccacctgtggccagggctcccaagccctgtgtcccatcactgatgccaagaggtcacagctggtgggtctcatcaacatagaaatgacggcagagctgccacctgcaccagcacattcaggagtacttagtgacctggacccaattccacgcttaagtgtggcggcttaatccacaaatgggcctcaggcttccccaaccctcaacatccagccaccaagaactgtcctctatcaccagttctcagaggtgtcccctactgccaccaccccagccagccctcacccttgcctgtctgcattcgtgtgacacagtggcctcccctggtctaggcctatatgccaatccatccaggctctagggccatggggagtgaccctccccaccgttccctgctgatgccctgtcggggaaaaagtgtccatggctacagcagccaggcctctgcactgcaccctgctccttgctccagcctgggccatgcctgctgtcccctgcaggcctctgcatgtgcccttctctagctcacaggccacctgggatcaccttctaactgtccccagtacttggcttgggccacacctctttggggcaaaccttttctgctctgcaagcaagatcgggtgtccctgaggcccaagcctgactttaggccaccatcgggtgaccatctatctccaggactatgaggccagctgggttgagattgccacaggagacagacccattttacagatgagaaaactgaggcctaacaggtcaggggctgtaggtcacagagggagtaggagaggagaacctgcctcttccccaccagtggtcagccaggctatggtcaaaggccatagggctaggaggacagcacccagcccatgtgatgtggaggtcagggagggggatgtgtgcgtttctgcatggtgtgtatggtgtgtgtgccaccccacataggcaccacagtccccagccccagctctctgaggtgccctcagcttccacttccctgggcaattatgtcatcagcactgcagcagcgggagcacccccacccgggctggctgacccctcacctaggaccctcccatcccaagggcaaagaccctcaagcccctccccgcagacagggccacacagtcccaccaagctgggacacaggccacccaatgccactctcccagctccatctatggctacagtggcccacactgtcaggacttcctgttttgggtcaggttgttcattctgcacccaacagacacctgagagtccgttatgtgtccaggagagggtgattctgtgcatgttacagacacaaacatgcaggtaccatacagaaacacacacacacaccatacacaccatgcagaaacacacacacacacacaccatacagaaacacacacacacaccatacacaccatgcagaaacacacacacaccatacacaccatgcagaaacacacacgcacaccatacacaccatacagaaacacacacacacaccatacccaccatacagaaacacacacgcacaccatacacaccatgcagaaacacacacacaccatacagaaacacacacacacaccatacacaccatgcagaaacacacacacaccccccatacagaaactcgcgccatacactccatacacaccatgcagaaacacacacacacaccatacacaccatgcagaaacacacacacaccatacacaccatgcacacgcacaccatacataccatgcagaaacacacacacacaccatacagaaacacacacacaccatacacaccatgcagaaacacacacacacaaacacgcaccgtgcagaaacacacacacaaacacacaccatacagaaacacacacacacaaacacacaccatgcagaaacacacaaacacaaacacacaccatgcagaaacacacacatgcaaacgcacaccatgcagaaacacacatacacaaacacacaccatgcggaaacacacacacgcaaacacacaccatggagaaacacacacacacacaaacacacacaccatgcagaaacacacacacaccatacagaaacacacacacaaacatacaccttgcagaaacacacacacacacaccatgcagaaacacacacatgcacaaacacacatcatacagaaacacacacacaaacatacaccgtacagaaacacacacacacaaacacacaccatgcagaaacacacatgcacatacacacaccatgtagaaacacacaaacacgcatcatacagaaacacacatgcacacacaccatacagaaacacacacacacaaacacacaccatgcagaaacactcacacgcacacacaccatgcagaaacacacacaccatgcagaaacacacacacacacaaacacacaccatgcagaaacacaccacacatgccccccccacacacacccatacatacaccacccacaagcatgcccacaccatacagaaacaaatgcacacacacacaccaggcagaaacacacaacacatgcgcccccccacacccatacaccactcacaagcgcacgcacacacatcatacagaaacacaacccatgcaccacacacagacattacatatgcatcatacagaaacccataccacatatgccacatacacacacacaccacagatacacaccacacacaaatatacacatcatacacaaacatactcccatacaacacacacaccacaccatacatagacatcacacacatcatacagaaacccataccacatatgccacacacacacacagaagacacacccccataccacacccggccgcacagagttggtggctccgagcagggcaggctccccagcaatccccggccaagggacgtcattctctttcttctgggggaaaatgggctggggggcttcagagcctggcacgtcgcctggccagcgagccccgtccacctcactacgtgctgctcaccctgcccacctgacccatctgagccacagcaagcccgggggcagccagggcataggctgttcccccaatttagagatgagaaaactgaggctcggagccacaagcatggcacaccccacacacggaaaactcacaccgtggagtttgctgaaaaccggccattctggaaggaaagatgggaagcagaggagatgggagagactgtgccaggggaagcctgtgcctgagggagcaagaagggtcacaggctgggcccagcaggggaggatcggttgtcagcctcaggctccctggcaaatggcttggtgggacctcactggcacgttggtgaggcccaaacagggcaacagctgtgacaggacttggcaggctgggaggtggccccgcaccgtgtgaagagaaacaatgtgaaggaacacaaggccagggcacacctgggaaggccccacaggccacatccccccttcactcctgtgggattccctccttgatcccctttccctgacacgtggtcccccagcctctctcgaaagtccttccagtgacaggaggccccactcgggctcacccttggcagctctcacttcagaaagcacttctcatttcgaaccaaaaagaagcaaacaaaaactgacgcccgtctaacctctgcccttagctcctccgggcactcggaagcccccaaaatgcgtccactccccttcccgcacacaggagccctttagagatcgggaagttcccatcccaccacccccatctctgggtaacacctgctatgtatcaggcgccccatctgcctttcacaggacaatctcatttgacccctacaaagatgccctgtaaaggctgtgatgccaggattaccaccacctccacctgcgggtgaagatgctggggcccgagacagaaactggccacagtcatgtggttagaaaagggctttagagccagacggacatggattcacctcccaggtgggtcactcggggtctagggtcagttctctgagttgtctgggcctcagtttccccatctgtgaaaggaggatctctcactgcatccaggctcctggactatcagagccccacaagtggtgtctttccatggagtcagggcaagggaagtgtccccacaggtgtgttctccaaatgggtggacagaaggccacctgcttccgtagctggggcccaggggctgcaagcagtgaatgagctcagaagggaccaggagcggggagggagggaaggggagtctttattggcacaaggtccaagcccgtgggctgggaaatttgtccccacaacaggagacccagctggtcttcaatgtgcttcttcaagtggaaaaaaaatgaacggatccattgtctgcctgacaaagccccagcccggatgagcaaacacgggagccacgtgcctcctccgtccattccctccggggctcgctccccacgtgcactgcccaagtcccatgctccacctgccaagtcctctctagagtccttctggtgcccccagccttgccacctgcagctggctgacctcacaggccttcagggtctccctgaccctcctcctcctagccacccctgcagggccaccagaaggcaccacctatagcaagcatcagccacacctcacccctgcagagagataaaacagcagtaacaggaacctgcctgtggcggcccactgcccagaacccccacacccagggggtgccttgcccggcccctggccgtctcacccgggcgtcgggtccacttgcaaccttcagagctccttccacaccatcaggtttagttgaatctccagtaccaggcaaggtgccttgcccagagcaggtgacagtacccctgggagccctctttggatgcctgctggatgatgaagacatcacacaccccactttcactccgcactgtggggtgtcttcacatctacagagttcaggcaggaggacacacgccatccagccatcaagggacacaggtttcctgattccttgataaaaatagtccccccttctgcagaatcaagtacaactggacaagagctggcacatgtgtggtcagatgctgggcgtggccccaccccatgccagccaggaaccattgatatttaaatgtggcctttggctaaatggtaaggtactgaccattaagggtccttggccttgctcttggataaacaaagccatgagtgtttgatctctatgatctacaaggtttgagatcacattgaagtcgactggttaaacacatcaccccattatctgttcagcacaagtttgtgccatgtctcctgaaagccaggtgccatgctggtacagggaccaggataccaagcaggacccaccgtgccctgccctcatgatgctgatggccattcctgctgaaagttcctttgtccagacccccactcagctgccgttctcaatatttccctacacagatcaggaggaagccatccctctgcattgtaaatatgaccaaagaggttatgatgagatttctccatgaagcacaactcccgcccctagaaaagtattctgaggtcaaaacacccttcctgtttctggcagcctcaattgccaccatcacctgtcactgtcccccagtcaaagaatcatcacgttcacctctgctgtggaggactgcaggagacactgcaacagctgaccaccacaacgaccctgccctcaacagcctccttctcctggtcctaacaagtccatcttgatatgtcccagtgaagccaagttcaggagaagaggcctctctaaatttggaagactctgggacacctctggcctcatggtcagagacccacagagcccaggtccagctcatcatgccaaccccagaaagatcagagaaacttccagttagggcaatactctgcacttacctgccccaggccactttggcaaagtcctgcccaatgaagtgggggactctatataagaggaagggaggcaggggaagaaggagggagcggggacgcaatgagaattgaatcaaacttttagtttctggtctgtcacataaggagcttagaagcatgactcccgtctaaataaggcaagttaaacagaatgcaaatcaagaacttttcttggatccatcagacaactgaggtcataggacaaactactgctccaacatttggaaaggcagacaggcagatacacagaatcacaacataccacagcaaaaacctccacaggaaccagtttaggtcccttttaccaaatgcatcatgtctggctctcaacaaaaaacattccaaagcatactaaaaggcaaaaaagagagcccaaacattggaagcagacatggtagagaagctggaatgatcagactggaactttaagagaactacgattaatatgccaaggattctaatggaaaaagcagacaacatgcaaaaccagatgggcaatgtaagcagagatgaaaattctaaaaaaaggataaaaaggaaaagctagaaataaaaagaactttaacagaaatgaagaatgcctttcatgggctcattagtagaccgaacacagctgaaggaagaagcagtgggcttcaacatacgtcaatagaatatttcctaactggaaagcaatgaaaaaaaagactaaaaataaataaataaaaaaaacgaatatcccaggacagtcaggcgcgatggttcaaacctataaccccagcactttgggaggctgaggaaggcaaattgcttgaccccaggagttcaagaccagcatgggcaacatgatgaaaccctgtctctacaaaaaacacaaaacttagttatgtgtggggatatacacctcccacctcagctgaagtgggaggatcacccgggctcaggaggttgaggctgcagtaagccatgattgcaccactgcactccagcctggatgacagagtaagaccttgcctccaaaaaaaaaaaaatatcccaggactataagacaactacaaaaggtataaacacatatataaaaaaaagaataacaggatgagaaagagaagaagaaattgaagaaatatttgaagcaatagtatctgagaatttcacaaaattaatgtcagacaccaaaccacagatccaggaagctcagaaaatagcaagaaggataactgccaaaaaaaaaaaaaaacaaaaccctacacttagcatatcatatgcaaactgcagaaaagtagagataaagaaaagatactggggcctggcatggtggctcatgcctgtaatcccaatgctttgggaggctgaggtgggtggatcacttgaggccaggagttcgagatcagcctaggcaacatggcaaaaccccatctctacaaaaactacaaaaattagccaggcatggtggtgcgtgcctgtaattccagctactcaggaggctgaggcatgagaatggcttgaacccaggggacaggggttacagtgagcccagatggtgccactgcactccagcctgggcgacagagtgagattctgtctaaaccaaaaattattaatacatccgacttccctgcagaaaccatgcaagcaagaaagaggagagggaaatacttaaagtgatgagaagaggaaaaaactcaccagtgtagaattctgtagcctatgaaattatccttcaaaaatgaaggagaaagtctttctccagacaaacacaaatttaaagaatttgctatggacacctgccttggaaaaaggaagattaaaagcagctcttcagagttgagggaaaatgacaaaggtcagaaactcagactcacataaagaaaggaagaattttagagaaggaatatgtgaagataaaataaaatcattttttattcttaattgactgactagaacagtttgtttgaaataataacagcaacagtgtaattgatgggtacagcttatggataagagcaatgaatgggagagacgaaacgggactcatgagttatgagatgcttccactacacaggaagcagtgtgttgttatttgaaagtggacttggattagttgtgaatgtatattgcaaactctagggtgactactaaaaaaagttttttaaaaagtacacttgatatgttcagaaggacagagcatggaaatgttattaaaaccacagaaggcagctgggcacggtggctcacacctgtaatcctagcactttgggaggccgaggcgggcagatcacttgaggtcaggagttcaagaccagcctggccaacatggtgaaaccccgtctctactaaaaatacaaaaattagccaggagtggtggtgcacaccggtagtcgcagctacttgggaggctgaggcaggaggatcgcttgaatctgggatgtggaggttgcagtgagctgagatctcaccactgcactccagcctgtgtgacagagccagacattgcctcaaaaataaaaaaaaaaaaaaagaaagcagaaaaggagtagaagacaaaaatagaaacaaagattaagggtcacaaacagaaaatagtaacaaatactatagatattaatccacctctatcaataatcactttaaatgtcaacggtctaaatacaccaataaaagagactgttggggtggatcaaaaaacaaggcacaacttgtgttatttgtttctgtgctacaagaaagcactgcatttcaagactcgcatgcacaaagccagccaacttctacacattcatagtcaattaagggaaatgcaagcagcaattaattcccagccactgttcatctcttggtgttgacacaatctctaaactacaaccaaaaaagcaagccttattttttttaattaaaaaaagatctttgtaataaattcaatcagataaaaatgtcattataaaaatgatactcaaggagctcataatgaaataatatggcccaacagaacaccaaaaaaacctcataatgacaaatctgaatgaaaatcacaaagacaatgcccatgccagccagaattttaaagttagctaagctcctgaatattctataggcagacctccgctcctgctcagtgccaaggtacctccattgataatggggatggtgacttcgagcacaagctctttgaaagccttagaagacgtacaaccataaacattttgtttccatatgaaaaaggttagaacaagtactccgtattatttatactttcagagggagggaaggagagcaatagagagacagagcccatgttaaactcaattccttaaaaagcaaatgaacaagagttctcaaagaaattaatccttcccagcctgacgcaagcagattcattcatctcccctctgcaactctgttccttctgtgggtctagtttctagccatgatgttaatgcctgatagtgggtggtgggcagggggcgcatggagggagaatcattgttttaccaagtttcttgcaaagctaattttgccctgggaccatgcttcccaacaacaatgtgtcctcctggccttggcaccccagcaagtgtgttccccacggtgtccttggcaaatctgccacacagttcctgacatttcccagattcccttgcaggaggtaggggtcatatgactagacctgacctgtgtcacttctgggctaaagctcttaaaagctcacatcactcttctctctcttcttggctgcagggacctttgaagccatgcattgagatggttggatgaccagacggagggggctggatccctgaatcacccactggagtgggcctgcactagagcatgtgtgaattagaatggactgatatggttaggctttgtgtgcccacccaaatctcatcttaaattgtaatccccctgatccccaggtcgagggagatgcctggaggaaggtgactggatcacaggggcagttcccccatgctgttctcatgatagtgaatgagttctcacaagatctgatggttttataagtgtttgacagttcctccttcacatactcgctgtctcccgcctgccgccatgtaagacatgccctttccccttccaccatgattgtaagtttcctgaggcctccccagccatgtggaactgtgagtcattaaaccgcttttctttataaatgacccagtctcaggtagtatctttatagcaatgtgagaacagactaatatacagaccttttggggtttctttgttactgcagccttgcctcatcaaacctgactgatgctctcttcttgaaatgcccctccccgtcttttccacctgttcatcttctttaaaattcagcttgggcatcacctcctctgggatgctttagctggcaccacttcccacccctaggctgggtcaagggcttcctctgcataccaatagttcctcaagcttccctgtctcacagctctgatcacgctgtgctggtgttgcccatccccgccaccagactcggtgcccatgacagccaggcctgttgcctcaacctcccaagagcctggctcggtgtctgccagaatcaaagcagctcttgagtgcctgtgaaatggactcaatctgtccacacgatggtgccacaatgccctctttcacacatgcaaatactgcaccaggcctggggaggcagagatgagccacatcctctctcccccaccagagcctcaagcctagcatgggagggtggcgcatgcataaataaagacagcccaaaacacgcagtgtagatgcagataaaccacggtggatgcccagaggcaagagaagtgtcttctagctggggactccacacacaagacagcgtctgggctccctggcaggccctggacatgtagagatggcaggtgtagggctcgtgtatctctggtctggtatcgttggggcagagctgctcagtctccatgggggccactcctccccatcctctcccattctcaagccatggtatatgggctgactcgtgtccctccaaaattcttatgttgaatccccaacccccagcacctcaggacttcatgtttggagacaaggtctttatggaggtaagttaggtaaaatggggctgtggattagggtgggacctaatccaagatgacggatgtcctaacaatacgaggaaaataggacacagacacatagaaggaagaccatgtgaggacatggggagaagacggccgtctacaagccaaggagagaggcttcggaagaaaccaaccctggtggcagcttgatctcggacttccagtctccagaattgggagcaaatgtctgtggtgtgagccgcccagtctgtggagtccatcatggcagcccctgaagactgatacagagatgctccttgagctgcccgaccccactccacggacggggatttcccaggtccagcctggcctagccttgataaaaaagccatcgcatacacagcattttgcagattaaaataatctagttccctgcataccactgcatcaaccataccacccccgctgagaagttgcttcttgccccatgttacctatgacaaaccagaggctctgagagccacagccagcctggacttgaacccaagccttctaaggcccatcccactggttcttcccctaaaccacactgcccagcacaatgctggctcacacagaacttcttactaacagtttcagatagccacctaacaccttggcagaggctggtgtcagaggacttaagaaatggtggggggagaggtggggggggacagcaaaaataaggagtgaatgaagtgtcccttcaacatggaccgaggctgggcacagtggctcacacctgtaatcccagcactttgagaggccaaggtgggtggatcacttgaggtcaggagttcaagatcagcctggcgaacagggtgaaaccccatctctactaaagatacaaaaattggccgggcatggtggtgggttcctgtattcccagctgctggggaggctgaggcaggagaatcacttgaacccaggaaatggaggttgcagtgagccgagatcacaccactgcactccagcctggccaacagagtgagactcaaagtaaataaataaatacataaataacatgtaccaaagtgcttgacgtctaaatgcaggcatctgtgaatccatatttcagtctgcttgaacccaaaagaccatgggaatatttaagtacttctgacaaatcagtaccctagtgataatatctcccactgggagcaggaatgaaggaagcaaagccacgacgttgagggacctgctggaaggaactcggtatcagtccagagtgatctatttaatctctcaaggtcccaagagggaggcctcgcttcccatattttgtatctgagacaatttgggcactgagcgactaagttcctgtccacggtcacacaaccaaggatggctcgtgtcacctgcaccttgctcgactatccttttcttgcctacttttctgatttttcatggtgattagcacccagtcaggagccacactaaagaatctggaattccaagaaatggcctgcccaggaaaaataaataaataacaagaacttcctccctgtccagtccagccagctgaccacaacccacatcgtgggggtcctgactacacagaaagccctcgagaaccactggcagaaagcaaaaagctagttaccagcagcggcactacccatcacataacaggcatttagacacagttgcgttgaagtttggcaagcgcatgggattccactgaccatgccattgtacagatgaggaaactgaggctcagggaggtggcatggggagccaggattccaccaggcccctgggactctgcagcctattccctccagtcctcctctgcaccagtaatcaaactcctacacggtgtcccctccgatgtgcccccaccgagggaataatcactcttcctcctcaacaccccctccctattttcatggtaaggtgctgcatgctcccttgccttgcagagcctcccccatagggcttggaatcgagccacatgcagctctgcctcctccacctgacaggacatgtgctatgccaggtcctggcttccccgtgccagcagccgggctcaccagggcccactgagccacagcagccacagtggctgcaagacggcacgcgctggcattttcctaacagacggatcagctttagacggcactgttcccgtaccttcgctgggagtcaggaaattcacggctctggcccatggaaccttaatcacgtcacacctgatacagttcctgaaaagtcgtctcacaccctgggtgacagcagacgtgctaagtaggaacccccttcaagtcctttgctcagggaaatcaggagctgtgatttggttgaacgttccagatggcctcactcgagagacgctctttttcagccaatccacactctctccgcacctggaggcaatgacccccacaggggaccaaatgagctatcctgaaatgcggaggctaaagagccacaaaccatatctctgagactcccttggagctagggctctgcacatcacttaggttccatcattcattcaattcatcagtccttcaatcacacaggcctgacctgaacacaagtgagagccaggtggggataggacaaggtgcccactggctggcatgggcctggcagacaaggtgtgctctggcgttgggggtccaaccatggccttctccttcctggcatgggcctggcagacaaggtgtgctctggcgttgggggtcccaccatggccttctccttcctggcttgcagctgaggctgtaaccagctctgggacagtggctcccaatgccccagctcccagaggtggcagaggtggcagctcccgagaggccagctctggggtgacactctgggggtcaagcctaagcccagacaagactctgctccctgaccttccactactggcacctacttccctgtgctccgtccctctacttaaagtagctggacagagtggcttctgttatctgcacctgaacacagatgaaagctggggtaccccagaacccaagttaatttaatttttatttatttttatttttatttttttgagacagagtctcactctgtcacccaggctggagtgcagtggtgcaatattggctcactgcaacctctgcctcctgggttcaagcgattctcctgcctcagctttccaagtagctgggattacaccacacctggctcatttttgtatttttagtagagatggggtttcgccatgttgaccaggctggtctcaaactcctgacctcacgtgatccacctgcctcggcctcccaaaatgctgggattacaggcgtgagccactgcacctggcctagaatccaagttaaaattaaagagggacacacaaaaccattttaaacacagaagcagaaaaccaaatattttgacgatgttaactacagacagaccctccacacacctacatccactggcagaacttcacgttctagaaccacggaatggccgtgcagtggcgtgttctcaacggccagctctgtctcagaatgggtacgaatcttgactctaccacttgttagctgtttgtcctggggcaggtgccttgtcctccctgagcttcagtttcccctaacctggaaaaatgaggaaaatcatagtacctgccccggcaaaagcgaatgcgcacagagcactttcaacagagcaaggccagttgggcgctaagcaactactgcttactgccttgattcctgggcttactgaactctcacgagccttcatctggctggaatatgtctccccaccccaccctgtctgttcatcctccatggccttagtcaagctgttattgtttgcatgtgacatcattagaaacacacacacacacacacacacacacacatatacacacacacacacacaccagcaggtcagccctgctctcctctggactcctcttatgcctgagccccactttccccctgaattttaacctgctttgggagggttcccatgggctccagaaactttcactatttaaaagggttctgccccagttaaaaagcatttgagaaccatagcatcagaagagcatttcaaggacattgaaaagtattcttgatttatgtgaaagggtttaaattgtgtcactcccaaattcatacgctgaggtcctaacccccagtaccctcagaggtggtcttatgggaaacagggtctttactgaggtcatctaattgagatgaagtcaggagggtgggccttaaccaatatgatgggtgttcctacaaaaagaagaaatggggctggtcgtggtggctcacgcctgtaaccccagcactttgggaggctgaggcaggcggatcacaaagtcaggagttcgagaccaacctggccaacatagtgaaaccccatctctactaaaaatacaaaaattagccaggtgtggtggcacacacctgtagtcccagctacttgggaggctgaggcaggagaatcgcctgaacccaggaggcggaggttgcagtgagccaagaccatgccactgtgctccagcctgggtgacagagtgagactccatctcaaaatataaaataaaataaaataaaataaaataaaataaggaaatgggagcacagagacacagagacaaaggagaacaccatgtgacgacgaaggaggaggtcacggggcagattccacgagccaaggaataccaaggactgccaccaaagcacaggaagccaggggagaggcctggggcagagtcccctcgcagcctcagatggggtcaaccctgcccacgcctggatctcagacttccagcctccagaactaagagaccatccgtttgtcttgtgtattccatggtacagcggccctaggaaacgaatatatttattagatggattgagatgtactgagaatagctatgaactattgtcccagttttttggagaccaatttcatacacacaggggagaaaggctgacagcggcagaaacaatcaatgttcacgtggctctccacccggacatttgggctgctccctatttttcttttttcctcttttttttttttttttctgtggggagggactttcaccaacatttgtgtgatacacatcttcccacataaatcataatgcacacctgatgatgggccgaccataaatccccccacgtggcgaggctggctcagcaggagcactgtccctgttcccccaaaaggcccaccacagacccaccccaggagtgtgtgctcaggtcctgcttcatcaacactgggggtcagtgattcgtggtccccccgatcagcttaaggccccttccaataatgtggctcgggtctttctgcagggtcagagggaagtcggcccgctaggtgacagtggttcacagcgtaaggacctctgtccccactgctcctggaggggtggagaaatacatgattttgtttatctccttttgatctgtcttctccaagacattttccacaatgaaaatgtaatgcttttacctggaaaagggatgacaaagtatcccagataacttggtagaataatatttctctcgtctggtgtcatcctttgggcaataagaaagatgcaattaagtaggcaattgtaataaagaaaattactgacctcaggtcagccacaggcactggttggagctcatctgtcctcagcacagtgcctggtgtatggtagacactggagaatggtgggatccctctctttacaaaatcagaagctgaggtccaaagagggaaaatcacttgcctaagaccccagagctgggtgacggcagagccagccctgtgggccaggcatctgggacctgtaacctcagcagccagcatgggccccctgcccagcattcacagcgaagaagcctcagtcagtcactaccatcctaattgtatcgcgtagaatgagaagcagctaccaacatttaaagtggtagacgaggccgggcgcagtggctcatgcctgtaatcccaacactttgggatgctgaggcaggcagatcacttgagcccaggaattcgagaccagcctggccaacatggcgaaaccccgtctctattaaaaatacaaaaattagccaggggtggtggcgcgcatctgtaatcccagctacttgacaggctgaggcaggagaattgcttgaacccggcaggcagaagttgcagtgagccgagatcctgctactgcaccccagcctgggcgacagagtgaaaccctgtctcaaaataaataaataaataaataccaaaaaacaaacaaacaaacacaaaaaacaaagtggtagatgaaacccttcctgggttgctgctttacaaaacaaatattgactacagtccttaggacccccataaataattttatgggcaacagcacctatgccccagggcctggcctgtgaatgccctttctcctccactcccaaatccacatgattctccatcttaacttgccggtagctggcccagccctggtccacagaagccaggtggagaaatgcaagagctatttctgcaccaaatggaaagtggccccaggacactgatgccgaggatgctgactgtccactcttcggcaacctccctggccactgagcagcccggtgggagcggaagttgatgtggaaaccactcatttctgctgtcaggctctggcatggagaggcgcttacgcttcctaagggcgttaaccgtctctctctcattttaaaaatcaagtttactccaataaagaaacttgggagaacacagaaaaggaaaaggaagagaaaaagaaacttctcttccatcccccacccccacccactgtgaacactctactgacttccttctgggctgcttttccaggggcagtttttacttaaactcatgtctatcagtcattttctagcttgtcttttcctcttcatatcatgaaataagaattttccaagacgctctgaagagtggtggaggccttcctacctcattccatcctggatttagggacactttggttatttctgaggattttgtacagatttagaatttttttccatggagagattccctttccaattcactggccaaacgctgcaaagtttcgaagaggctcgtacccatgtatgcccgcacaggcaggggaaagggagcccccgggagctctgtgctttaaaagggcagtttctcgtgttctgtccttcccgagtccagtgttttttaaacgactggtttttgcacctccagccaaagtcttacatgaacttgtcacatgagagaagtcctacgtacactcagcaatatgtaacagttaagggattttgcttttatttaatattactggcactttttttaagctaccatatcacaataatcagaattccaaccctaaatccttaaaatatagctggagtctctgctctcggacttaagaggcagctggcattgggatcaaatgtgcggcctctggacaggcacagctctgcttcccagccgccaccctgaggtttccaggagatggcaatggatggggtgctctggccccggggcctggccgcaggcagagatcagttcatgaaggcagagctggttatgtggcagatcctcccaggggtacaaatggcatcacaggattttcaacaacttcattgcttacaggtgaggaaacggaggatggaaaggtttaagggacatggccggcaatgacaaagcccagcctggagtcctgaggcccctcagtccagcactgtgtgtgtgtgtgtttgtggcctctcatctctgactatactatcaatatgaaaagaaaaactgcctcgatgccttctgggggcagcctggtggactctggaaggctgaagttcaacacagactctggctctgcctcactgtgtgactttgagcaagtttctcagcctctctgagcctctgccacccacctattaagcagaaagcagcacagctctcccctgtgagtacgagctaagttaacccacgcacagcaccttgcacagtgcctggtgcgtggtagagtttgcagaaagcactatcttaatttttgtttttattttcctttggatacattctaaaagctttatgaacagacttgggggcttcctgacttcctgtctgaatctcagccaattctgggatctgggtgtgggaagcctcctttgccatcagcaaggcctcgaaactcagctgccaccaactcctctctggcgccatgtctgaacccaggctggtaagagtcaacgggtcccctctggagccagcatgtgccacctcacactccacaatgggacaagaggcaggcctgctggatccggcctgggtcccacctggcctctttcagttatgcctccagcccctggataatatttttaaacttttcagttaattttggcacctcccctagaacagcagttctctgagtgagatccttagaccagcagcatctgcatcagctgggagcttgttaggagttaaaattctttggcctcaacagtaacctactgaacagaacgtgggggtggactcagcagtgtgggttttaacaagtcctctgagtgattctaacacacgctgctctagaacagttttttatttaaatagagaagaaaaaagaacaatttctggtcatcagggaataacagaaggcttgtaggacccaggccaggcaagccccatcccttccattgattggctgatggctctgggtgagtgccttccttccttctcagtctccagggctggagcagggaccacagcatctgcctcacaggcatgccagggggtcaaagcagagaggctcactcgggcccagcttagagcctggcatggggaggaggctcaggaaggaggagctgcatcatgacacagaggtctgctttggacaaaccataggcctttctggcccccacatcctgtatgttaaaaaaaaagtgcaaatctgatgcaaattggtcctttaaaagccctggccttgtcagccattcccttcccattcaggtaaaactgtaatgccacaacaaaaagttgaacacagtagtatactaaacatacttaacacctagatacgtagaaaagcacaggcctagatggctgcaggggtgaattctatcaaatgtttgaagaagaatgaatatctaactctttcaaaaagtaaaagtgcaaagaacacttctcaactcattctgtgaagccagtattaccctgacactgaaaccagacaaagatatcatatgaaaactacagactaacatcccctacaaatatagatgcaaaaattcacaacacaatactagaaaaccaaatcctgcaatatataaaagaactatatgccatgagcaagtgagatatatcccaggaatgcaaagttggtttaatatcccaaaatcaatccatgtattataccatattgatggaataaaggataaaaaccacatgaccagtaaataggtacaaaaaagacatgttacaaaatccaccagcctttcatgataaaaacactcagtcagctaagaatgaacagaagggactttcacaacccaataaagagcatctaccaaaaccccacagctaacatcactctcaatggtgaaacattaacgctttcccttaagatctggaacaagacaaagatgtctgttcttgtcaattctattcaacattggacttgaggttttagtcagggcaactaggcaagaaaaagaaataaaaggcacccagatcagaaaagaataagtaaaattatctatttcccaatgacatgatcttgtatatagaaaatgctaaggaatctactaaaaaaactattagaactaataaacaatttcagcaatgtggcaggatacaagcttagtatacaaaaattaactgtattcctatacgctggcaatgaacaacgtgaaaatgaaataagaaaacaaccggatatagtctagaggatgcaagtacctttttgcaccaccactggatcagcatgatcattaataatgaatcgtagaaacagccagtatgcacaggcaccagccccatgcaaggcactgaaccaggccctttccatgcagcatctccttcaatattcacaagaaatggagttctccccatctgacatatacagaacctctggggtgaagaggtaaagtaacctgcccaagtcacagagctgattagtggaggcaccaaaatttgaacccagacagtttgactccaatattcatgccttgtccctgcactgagctcacacagccttcacagtcccagtggttcttggcctggggtgctctcaaaaatatccatacctaaaaaaaaaaattaccatatggtcccagaattccacttctgggtatatattcaaaagaataagagctgggtcttgaagagatatttgtgcaccatgttcactgcagcattattcacaatagccaagaggtggaaacaacctatatttgtgtgctaggctgctacaacaaaccactacacactgagtggcttaaatatcagaatttttttccttgcagttctggaggctgggcatctaaggtcatggtattggcagggttggttttaatataagatcctccttggcttgtagaccctgccttcttcctgtgtcttcacatggtcatccctctgtgtatgtccatgtcctaatatctcctcataatcacaccagtcatattgaattagggaccatcctaatgacctcagtttaatgtaaccacctctttacaggccgtatctccaaatactgtcacattctgaggtactgaggatgaaggcttcgacataggaactttggggggacacatttcagcccatagcacgttgcaagtgtctctcaatagatgaatagacaaataaactgtggtctatacattcagtggaatattcagctttaaaaaggaaggaaatcctgacacacggtataagatgcatgaaccttgaggacattacactcagtgaaataagccagtcacaaaaataacggagaagtcaaactcatagagacagaaagtcgaatgatagctgccaggggctggggggaggttgcggggggatgaggaattgttgtttaacagcatagtttcagttttgcttaatgaaaaagttatttattttgagacagggtctcactctgttgcccaggctagagagcagtggcacaatcatggctgactgcagccttgacctctcgggctcatgtgatcctcccacctcagaccccaagtagtagttgggactacaggcatgtgtcaacactcccagctaattttttattttttgtagagacaggttttcaccctgttgcccaggctgatcttgaacctctaggctcaagcgatcctcccgcctcagcctcccaaagtgtggggactacaggcatgagccactgtgcccagctgaagaagtcctgataatagactgtggtgatggttgcatgacaatgtgaatgtacttaacactactggactgtacactgaaaagtggttaagatggtcaatgttatgttacatgtagaggatctgaggtaggtgatctggcctgcggtggggcacagatgttggtatttttctaaagcagccaaggtgattccagtggtggaacaggatttgaacttgggtctgaactccaaagtcctccctctccctaccgtacacttgaggtgacatgaggagatggcatgagaaacttctctacctcattaaaggatgagaatttctaaaagaccagctattgaaatacaatcacttatgagcctaattcagtttttttttgtttttggggggatggagttttgctcttgttgcccaggctggagtgcaatggcatgatctcggctcactgcaacctctgcctcctgggttcaagtgatttctcctgcctcagcctcccgagtaactgggattacaggagccaaccactatgcctggctaatttttctgtatttttagtagagacagggtttcaccatgttggccaggctggtctcaaactcttaacctcaagtgatccacctgcctcagcctcccaaagtgctgggaacagaggtgtgagccaccgcaccaagccttaactcagttgtgttttttgtttttttgttttgttttgttttggtttggttcggttttttattttaaaggcacacatcagtaagtaacaaggaaatagtaactggctgtccatgcagaacacatctgtgccagtcacggaaacatgggagaatgtctgggcaatggcctggtgaattaatagctgaggccaggctgggctctgactgacagcctcgtctgtctcccaggctctgctggcccaaatgtcttccatgtggtcctcaagagcctcccattgtgtcactcctatgactagatggctccaaacggtcccccaggctcaggatccagctcaagcctgctggccaggcaaacaaagccctaaccatctgcatccacggcctctgaacactcactctcccccaccgggtccacaccaactctcaggccacctaggtgtgggttctgtctccgcacctgcctctgcccagagggcccggcctgggtctgcacactctctcctcagctcacaagtctctcccatcacctgctgcagggcacccaagctcttgtgcttccctctgacatggccaccctggcctcacagggctggcatcagacttgttcccatccaattgttcattcattcaacaaatattcattgagcctcccctctgtatggaggatgctgttctcagcactgggaacacaaaacagacagaaatccctatcagccttgagctcacattctctgaattttcattccttaggagcaaggaccgtgtcttagtcatctttgtgctcctaggaccaaccacaggtactaagcaggtgctcagagaatagcgagtgcagaagtgaaaattaggcctgatctccactgctaagcagctttctgaagatgtcctgggttgggtaacacatacctgctaactggactctcgtgtacccccaagttgaatagcagctggagtggactgatatgatggctgtggtgcgtctgtttcagaccaagagcagggcaactgcatttcctggtgagatgccccaggaggcaatttacctacagtcttgaaggctggctcatgcccagaacattttcctagcgcagaagagtcaccattttgcattcctttcttcctaagcaaatgaggacttcaagcctcagcctcagggctccaggaaacacatatactcattactgttccccacagtccttcgagatacacaggacaccacttggaatcggaatgctttgtgtgggcacggactctgcgccgggcgcatcctccttttcaaggtggcaggagccaatttctttcactttttcacccagttccattcaccagcatttcctggtgcgctccccttgtgggaaacaggagcagaggaagaagggaggatgcaggctgagcctgcaggagccccaataaacggcagccctgcgttcttgtttattgttacttgtttatcactgtgcctccaactcccacccgcacacccatcacacccgaggctgcaaggcccaggcagccaggacctcgtctgccagcatgaccacagcatcctcaggcctggcctagaagaagcccccgttttatttataaatggacagatggacatccacgcacaggcatgtagaaaaaaggaggagtattttctagccagggcatggggactgggtgtggtgagacggggaggagtcaagaaagacatctgagtttctggcccaggtgccaaggtggtgccacggatgctttaggtttgcaggggggtggcgggagttgaattccaagaggccgtgtaacccgcaagaacacacccccaggaaacagtggccgggtttgcactgacttcggccacagccttagagaagggccactggggctggacagctgggcaggactgagctgaatgctttgtcgggtctttttaaaataagtaagctttttaactacatacaattaaattaaaatgagtgattttaataaaagtaaaatcacgctaatcaaataaaaaatgtgagagtttcagaagagaagacacaataagtgtttactctccccacaggccaacactaagggctttctcccaggaggaagagacaagcggagaagaactgcttggcccaggcccacccaggccacccacagctgaccctcgccatctgtcgtaggagaaacctcaccagatccaggtgagaaagtggagtcccagtgaaatctagggatgtggtccgagaccagcgagtaagaaatactgaatttgggacctgaaaccaactcgcactcgaaatcccagtttgctacacacgtggtcaagatagaaaggatgtccatttcatctctcttctgaagattaaagaaatagggcaaaaagttcctaatttaacattcaatatttatattggctcataaagtccaaagtatatcaagttccctttctccctgcagggtttttttcttctgatctggccagggccctgcacctcttgaccccccaccagcacagagcagccctcctttgctaccgggctggggaagatgaggcctaacgcttctcgcccaggctcgaaagcatctcagcaactgcatcaggctgatggtcaagatcctagaaggctgccccagtgacctctcccttccaactcccagctctccccacccatggcccaccctccagctgggcttctcctcctgcctctgctctgcaccttccactgcccctgcttaccaggaacgtcacccgccaattccaaatctccccttgcctaaatctcacatcctccaaggtcaattacacactcattcttccaagaaacacgcctacaagtttgtggagcgcctgccatatgccaagctctggggaagaaagtgaatgatacaggtagtgcccccttcggctacttccccacagcacagaacattctcctccatcagagagagagagagagagaagaaagtgctggcacaggccccatgctttgggcttatgtatattagctcagtaatcttcataattctttgaaggaggtgccagcttccctcccacccaacctcccagtacagagaaggagaaacacctcagagaaagcaagcagactgcggagaccaggggctgaggttggcccccggtgtcagcttctaactaaaagccttactgtgcagcgggcttctcaaggacagtgtccacggttcatccacctctacgtccccagggccctgtccggggcctgacacagcaggtacacagccctgtttgctgaactgagtggtttccgcatccaggaatagacacccgcttcttaatccctgcctcggaggcagctcccacggcgctcaacggactcctgaccttcatgaacagaccacggggccggcagcacctgcatcagcgtctgtctggcttcctcttcaaaacccaacagactccatctgggccccagaaaactgccctgatgctacaggtaggaagaaaaatcttttaaaagcacgttaaaaggcaggcctctaaaatcagcttcctagaccatggcgggaagaagaaaacaggcaagaaatttccgcatcccagcttcaagctcctccacttgagcaagacagtaataatgtctgccaccggaagacacccagtgcaacacctgaagcagtcagcgttgagtgtgcccaggtgacacacatttacaaccccaccagtgggtccctgtcatccaccaaaagcaaaacacctggtgaaggctgctggggatggcagctctttctccccaagctttggcttctatgtgaccttgtgcagcgcccccgccataccttccccagtctcccactgtctccaggctgtggcccaagtactctggtctggcattcaagctcctgagcttgtctcctgctgccctcccaactgtgacacggccatagcaccctacatgccaaaaatgaaaacaatggccaccatgtctatgttccatacaggacctcatttaatcctctccacaaccctatgaagttacttctgtaattattcccactttccctacggaaaaactaaggcttaagaagtgtctgcaactttctcaagatctcaagcccagcaatagcagggccaagatgaaagatgagatcagactcccatgttcttcctcactgcaccacaaaatactgcctccaaatccccaaatgctcagcgccctctctgaggtgcctccatgcctctgcccaagctgttctctctgcccagaaggccctctgcttgcttacccaccattctcaccaccccagacctggccaactctagcctcaatgtcacctcccctaagtcttcctagagcttcccatgccccacctagttgcactcacagcactgtgaccttcacagccgcatttaagctcagagtcctccagtcctcctggctggaaccacctgttctcctgtctgctgttcaagttctttgaaacttagagttgaaggtggatctcaatagccattgaagctggacggcaaagtggctaagggtatggagtgagaccttaggccagtgagtccttccacttgtctagatctgtttctttacctgtaaaatgagattatccaataaccataccaaactcatagtgttgttatgagaattaaacaagacaatataagtaaaagcagtgagcacagtgccaggtacatgacattgaccttccctgaacattagctgctgttgttatgatgacttttacttggtaaccactacggggctcgccactatgcctgatacactgttaccacttaataaaggtctcagggttggaaaggagaaaggaagcaggcgaaggaggaaggaagggagggaagaagaaagagacaggggaaggaagaagggagagaggaaggaagagagggagggtgggaaaagaggagacagagagagagtgagagagagcagggagggaggaagtcaaatcaactcggaataaaactatctaaccagcaaacgctgctctaaatgggagtaaaaaggtgaaatttcttccacttgaggccatgacctcccactgggactctgatcaagagtcctcactcactcatccaagccttcctttcttcctctttggtggaggctgcattacctaagcctgtagccccagctcctagaaccgccctcacccagccccaccaccaactggctggggagctgcctgctgctctgcatcctatgatcagagataaggcctggcattggaagagtttgtgtccgcacgaataaaaggcaggcagtctctaagagaaaacccgacctctgatcctgatgccggggaatatttatgtgaccctttaacccctatatttaaacactagttctttgatcccaatactcaacacttcactcttgcagcagatctttgcaatattctcacagaagtgggcatcctggccgagtgtggtgcctcatgcctgtaatcccagcactttgggaggctgaggtggttggatcacctgaggtcaggagttcgagaccagcctggccaacatggcgaaactctgtctctactaaaaatacaaatatatatatatatatatatacatatatatatatagctgggcatggtggtgggctcctatagtgccaggtactcaggaggctgaggcaggagaatcacttgaacccaggaggcggaggttgcagtgagccaagatcacgccattgcacttcaccctgggcaacaagagtgagactccgtctcaaaaaaacaaaaagaagtgggcatcccttagccccaattctaggaaacccacatcaccttcctgttaacctgagctcagtctgtttttctgtgaccagccccacccatgcacatccccctcccctacctgcctgaagactacacaggcagattcacacttgccagccaaggcttcaaaatcaagctctaccagactctcctggcatccagctcaccagaggccaacacctgctcaccattcgacagcaccctgattcctactcagaggccccaacgtccctgcctctcagcctcagctccaggggtcttccccgagcctggcctccttcacacaggccttggtcacaggcagatctgggtgagaagaggagccacgctgagcatcaggagccctgggatttgaagccccttcttctctccacagccttgtgaccctggccctctctaggcttcaatttcatgttttgaaaaatgagcactggagccaacggtgtttcccaaacctcagtcatcagttgccgccgctgtgacttctgcataaaatgcatggttcttcttttcttaaaattagctttccggaggtgtaatttgcgctgtaagagggtgcacctcagacagccctgacaatctggagagagaacgttttgtggaaggccatcatgttcccgtgtgcccctcggcaccttacctttatgtgcttagtacttttctttaacactactgacttttgaaaaacctgtacactacttcagccttattctaagcaaaaatatcccccaaatcataggcttcaggtgctatattttataactataagatacagttatattttccctaatgcacactaaagtattattaaaataaattatgtttggctactgtcacctaaaatctcacatcgcaacactggtgagcactctcactgagaaatgcggaaccagctacccgctccctgaggccccttttggctgggaaagtctggatcctgcctcttacttgtcacagagtctgcccaggtcttgtatgcggcagatgtttactaaatactggctgctgaaccagagtgagagttcaaggccatctctgcagcccccagaccatgcctggctgactgcatcctgctgcctatggtgagaaggcacaggcttgtgtcctgcagagctgataaaccctgcactcagggagacactgaccctcgcaggagggaagacagagcggagctggacacaggcggaggctgaagaaacaagcaaatcactggacgtgcagagaggctgcactggggagagttgctcctattttaggccattgaactactttaataattcggtcattttcacatcaaaaccattgcaaggaaaaccccctaggatgttaaatctgcatgcccagaaaggatttaccacaaagagcgtgaagagagtggtccccttccaagtccccatttcacaacaagctaaaaaccgaacagaagcctttagttccctgagtgattggacaaggaatttgtcagatgtctatagtcctttaaaaaaaaaaaaaagcaggggggatataaaaggaagaggatgcatttcagccttgaaaaaggcaataccgaaaaggcagacaccaagaaacttagcaaggcttccaagagcccaacacgcacagcccactgcacgcagggactgtgcccaactctgcagccctggcaaatggaattcttttcaatccggcccgctgaacccctctttcagtttacttactacccagcccactcctaactccccacccccagccatcatgaactacagacagcaccctaaacatcctgttctgcctttgtatccagtggacagtccttccttcctcctccacttgggaagctcctattcattcctcgaaggcctattcatccatcgcctcccacaggaagccccctgagaccctctcactccacaaaccaacacagagcacgcagggaaaggtgcggggtagggtggggggtcttagctggggtggagcctgagcctcagaggcttccttccttgtcctgtggataaaggaatttaaagctcattcccgagcagtgggaagacagtcgggagatgccagcccagcctgctgggaagatacttctggtgacagtgttggggtgtgctgaaattggatctgtgacaatgcagttgactctccgctatcaaaaggcctacacatgaatgcctggctggagcttccctccgcagtgaccctggtgtgcccacgaggaggacgaatgctcctcctaaggaggaaacaacattccctcctctgcgctcaacgccttttaataccagcaaccaccactcaaccaccaccaccgcgaatgtttacccagcccttatcctgcgtcagctctgctccaagcactttatatttaaccctcaagagaaccctaaaacataggtattctagagatttaaaaagtatggaaaggctaaaacacttgtccaaaagtgcacagctactaagcgggactcaaatccagacagtttggttccagggtgggttatggtggttggaaaaatgacagcaaactcctaactggctctgaaaacttctaaacgcccagcgctgctacctgatttcccctaaagaactcacggaggatttacgcgcatattcagctgcagggacatgcacggatgtgctgtttacaacaaggaaaataagcagccaactaaatatttgctaaatattcaccaacaactgtatgtcccatggcacatttatagaacgggatattatagtgtcctttaagctgaagctctatcatctcaaattttgctctgaaggcctgtgtatcctgattcccaagtgtgcttgctaacatgcagccttcctgggtcctgccctagacctcatgaatggcactctctagaggtggggcctggcaatcttaagtttgcacatacatttttctgtgcggtaatgtgtgagaaccgctgctggggatgaatatctactgccacggaaagggtcagctctgtgacttctgtccgtggtgggttcctcagtgcgtagaacagtgcccagcacaataatggatcttcaagaaatatttggtgatccagaaaacccatccatcaacaaactattctgaaataatctgttggcatttctaaatacctgacccatctgtgtgtttcttgggagcagagaccgggaacatcttctcaccgtaccacgcccggcacagagccagccagccacgcgcaaagccagccctcggaagtggcccgccaacacaggaacaagcgaatgccactgtatcacactgatcctaagttaacgtttctgaaatcaagattcatctcacattcaatgccccatcatcatttaatgaatagcactttttcccatttctttagtggtacaaaaataatgatgcatgtcccaattgacagcagcttagatttaataaaatacggtacctaacagagtccagaattctgatttaaaagtttaaattagctgccaacacagctaacagattgttgtgcatttcctttcttataatttgcagaaataaatccagagccatctgttctgagcgttcggcttcagcccccagtcatcctggtgacccagggcttagctactgagatgcaactcaaagatctgatgcatgtggaaggctttcatctgtcttcacccaggaaatgtctgacagcatccgctgagatgtgggagctaaaatatctccttcattgaaggctgtaggatgtacaagaaaggtcagttctgggctagaccttggttacatcccagctccactgtccccagatgtctggtcttgggaatctcatggccacacctggcacatggacatggtctgcccatgataggtgttggtcacgttacaattgttcagtagacccacaccccattggccaacagccacagccctgaattttctataacaagttccatggctagtggtttgaatgcgtccctcaaagttcactgttaatccccaatgcaccagtgtaaagaggggggacctttaaggggtgattgggtcatgagggctctaacctcatgaatggattaatgccattattgccggagtggattcctgataaaaagctgagttcagcccccttctcagctctctctctggaactctcttgccctgctgccttctgccatgagatgtggcaagaaggcccttgccagatgcaggtccctccaccatggacttcccagcctccagaactgtaagaaacgcatttattttctttataaactacccaggtggtgatattgtgttatagcaacacaaaatggactaagacgagtgcacctgggcaggttactccctctgcaaaaaggcgcacgggatgggaagctggcgcacaacacagggttgtcccaagaaccaaatgagattaaattgaaagctctctgaaaagcagcaatttctatggtaattcaggtaatttgtgatatttaggaagctacaaattatagatataagaatcttcaaattttcaaatcaaacttcagcgtacactttccgtaacaccttttttgactaagaatccatcattttcctaactttttcataagccactggcacagaccatcacaactcagaaccgggatctccgagctacaatcccaccagaatcccagctcagccatcttccccagcgtagccctggacatgctacctaacccctgctttctcctgtttaaactggtgccagttgtctgtggtttcacattcactgagcaggttagatatgcctctccgtaaacaccagccatgaagcagcacacccagtagggtgtgagtgagggaccgtagagtcgagaattctgatgaaaaaacttaaattagatgccaacacagctaacagattgttgtctatttcctttccttgggctctgttagaaccaagggtgtcttgctttgcatcagcagcactaactcctgatgcaacagctttctttctatggatcacttcattctcccaaagaacacagcttctacaacttcagaagagttatctgggccacatttccagggctatgtgctatgaggtagggctcaagctgtcggccagcgccgtccctctccctgtgtgagacgctggtcaagttactcctgctctctctacctcctctcctgacctggaacgcaaggatggggagaacggatcgcctcacagtgtggagggcagaccatgctgtaggtcatgcagtgcacgctccatacatcccaactttgccctgcggatactacatgcttctcaccaggggtcacaagctcagctatgaagcacttgaaagcccagaacctaacatcatagggatggtagtgggatggggtggtgtctgcctcccagtctgtatccatgtaggaatctcagtgatggccacaggtgaacgtggctccaggaaggcttccagaggcaggacccctgcgatgttcacctggccacccacagcacaggcctggctggatgagatggagagcaaattttggagtaaaataaagggctggggcttgggtttgaagtcacaggtggaacatgattcactggaaagaaaggatgaggtattccagagggcctgcgggagtggtcaactccatcccatagggccatttctccaccccccacccccaccagccccagctagtagtcatcatttccacaaaggaagtccatctttttaggttaggaaagaaaatttggtttgaaaatttattggataaaaatagggcaattcgattgatcaatgaggcagaagagaaagcccaaaaacagatccaaggatgtacacaggaatttaaaacacatactgggccgggcgtggtgactcacacctgtaatctcatcactttgggagtttgaagcaggaggatcgcttgacctcaggagttcgagaccagcctgaccaacatggtgaaaccccatctctacaaaaaatacaaaaattagcggggcatagtggcatgcacctatagtcccagctattcaagaggctgaggtaggaagatagcttgagccctggaggtctaggctgcattcagccatgatggtgccactgcactcaagcttgggtgacagagcaagatcctgtctcaaaaaaaaaaaaaattaataaaaaaccacacataatggtgaaaaaataacagctgaccaataaacactggattaactctggacaaaagactagctatttaggaacgaataaaactggatagccacctacagcctcacagcaaaacaactttctcatgtggattacaaatttaaatacaaacagagaaaccacaaatctgctaaaaaaaaaatacttaaagactctggaggaggagagaaaaggtgtaagcatctacaaaaggcaaaaattttaaatctctgtacagcaaaagcatcatcatagagcaaaaacatcaaaccacaagttggaagaaaaaaatctgtgacacataacaaatcccaggttaatattcttaatagattaagaggtttcagaagtcaaaattgctttaagcagcatgcaagtggaaaaaaaaaatagtgtaaataatggagaaacaattctcaaaagaagaaacgcaaatggccaatacacagacaagatgttcagcctgcctggtaactaaagaaacaagaaccaggatacaaattttcactcatcacattggcaaaaatgttaaagatttgctgttggcaaggttctgggaaagtgctattctcattcactcttgggtacaaactggcacatgttttctagggtgccgctgggcaatttctattcaatgtggactgctttcgctaatagcttcactctgaaaatctatcctaaggaaataatccacaaagatgggcctggcaagagactggttaaataaatcatagtatatccaaaccatgggggcctcagagatgttcatcatacctgctgtagggaaagtgggtcacaaacaacatgatcccatttttcatggagaaaagcccacatcagacactcacggacgtcacaaccctaatgatcaggattaaagcaagaaggtgatttccttttgggagtaagggaatcaggctgtttgaagaaaagagagttcttagaaagagaaggtggaatgctcctaacgaggacagggaaagtaaaaaagaactgaggaaacaggagagggtaagttcaggccaagaaaacagagaagaaattaggtcagagagaaaaacatcaagggcacccagcaggtgaaagtcaaaatgtcaggtatgagatgtaactgatgggatttttagagtcctcccaaattgctgggtgaaggaaagtgccaaaaagcataatgttctttcctctataccagcaacaaccaattagtggataaaactggaagacgatcccatttataaccaaattaaaaggagctagcaataaattacacagaatgttcaggaaagagaagaaaatgtgatttctttattaaggacacagaagaaaactgaagtgcaaggcagacgggatcaccctcgagccctcgcttccctcccgcatgctgcatgccctgctccctggccctagaccccttcccattcccaccttttcccaaaccctcctttatcctggctcctgaagcatccctccctccaggacccctcatcatcagactctcaacacgcttgctcatccccattcaaacaaaacatctcttcctgtgtccccaacaggccagcctccacgcctccctgcccctctacagtccttccagatggtctccacccgtcgtctgaagtctgcactgcctcttcgctttcctgcgcgggggcttcagctcccgcacctccactcacctccactgactcactgacctccactcacctcccctgaccaactgacctccactgacctccccgacctccactcgcctaccctgacctccactaacctccccgatctccactcacctccccgatctccacttatctcccctgacctccactcacctccctgacctccactcacctccctgacctccattcatctgccctcacctccactcacctccctgacctccactcacctccccaacctccactcacctcctctgatctccactcacctcctccgagctccactcacctcctctgatctccactcatctcccctgatctccactcacctcccctgatctccactcacctcccctgatctccactcacctcccctgatctccactcatctccccgatctccactcatctccctgacctccactcacctcccctgacctccactcacctccactcacttcccctgacctccactcagctccctgacctccactgacttctatggcctccactcacctcccctagcctccacattgcaagactgagcccactttttgtggtccgacctatctggctgccccgtgggctttggcatagctggcaggtgtgctaaaggaaaggaagctggcccaatgggaaggtgggagagccacacccgcctgaacggggaggtccccaaagactctgaccaagaagttatgctgagctgagctccaaagaagaaagaaggcaaactcagtggaaaaaaaaaaaatagaacattccagatggagagagctggtgtacaagcaaggagaaggaaggcaaggaacccacagagggtctgggtctccgagccttggactcaggaagtccaccttgctgtccaagggtgaccagagccaccgggtgctctgagcaggactgtgtcctcattggtcctggggtttgaaaaggtccactctggatgctggatgctgtgtggaggaggaactggagggccggattagatgaggtagaacccaggaggttgtcactgtgtcccagagataaatggtgcaagtttgggctgggcttatggtgcagaggtgatgaaaaacaagatatgtttgaaagctttcttgctgggacacctgggaggacgtggtgatgtactgaacatgggttcaaggaataggtgggatcaaagttccccacggtgtctgcctcacaccacgggtacatggtgcctccttgatggagccgagcaggaaggaaaggggtggattgcacaggccagccatgagctcaggctcagccatgtctgggacggggtagattatgggccagacggggggccaagaggtcagcagggcctcagggaaggtcaccaaggggctgtgagcttggacctcgtcccactagagggcagtgggagcgactgcagaccactggtcttatgaggaatgggacctctcagctgctggaaggcctacctaggtggtgacagggccagcagaggagagactcaccaggacactgcactgcagccgagcttgcatctgtgcagctaaggcagccagagcctgggaaactctcggcacccattttagcccaaccctggtctttgctggtgagggtcctggggaagtcacctccagaggccacatgagccaagtgacaggggcagatggagccagggcccttggtcccttctacacaatccagatgaggttacacatgtttcattccaaaaagagaatgcagtattagtgttctgattagcaggttaacttgcacaaggcagtcatgtcaacagggcaaaggcaccatctcgttcaacctgccaagctcagtgtggcactgcccatctgttagctccttaactgtcacgacaacctgttaagggcacagcattaccatcattatcatcgttcccactttacaggtaataaaactggctcagaaaggttaagtgacttgcccaaggtcacccagccaggagccaggtgtgggacccaagtgttccccattccaaagcctgggtccctaaccatcaaggactctcttgaatccaaagccactcactgccactccctcccatcaccaaagaaagcacatctgtactagcctgcgagcagcaaggcttccaggcaaagcctcatcatgaccatgtgaggccacagcatcagacacgggaagatgctgggaacatctggttctgttgtctgctaatcaaatccagcttcagggtttgacatgactctcaacagaagaaaacagctgtacccatgagagctgccagcccagggttctgcagagttcagaccctgaggctcccatgatggaggctgtgttagtttcctgtggctgctgtgataagtcacagacataccttgttttattgcactcaactttatcgtgcttcgcagatattacgtttttgacaaattgaagggttgtggcaaccctgtgatgagcaagtctatccgtgtcatttttccaacagcccacctcgtgtctctgtgccacattttggtaattcttgcaatatttcaaacatttccattttccatcatggtgatctgtgaccagtgatctttaatattactattgtaactagggacatcatgaaccatgcctatataatacagagaagttaatggataaatcctgggtatatgctgaccactccactgaccagccattctcccatcactccccatggcctcaggcctccccattccctgagacacaacaatgctgaaattaggccaattaataaccctacaatagcctctaagtgttcaagtatgagttgcatgtctctcactttaaatcaaaagctagacacaatgaagcttcatgaggaaggcaggtggaaagctgagataaggtgaaagctaggcctcttgcaccagttagccaagttgtgaatgcacagggaaagttcttgaaggaaattcaaagtgctactctggtgaacacacaaataataagaaagtgaaatagccctattgctgatatggagaaaattggagtggtcagggtagaagatcaaaccagttacaacactcccttaagccaaagcctaattcagagcaaggccctaactctcctgaaggctaagagatgtggagaagctgcagaataaaagtctgaaactagcagaggttggctcaggaggtttaaggaaagaagccatctccataacataaaagtgcaaagtgaagcatcaagtgctgatggagaagctgcggcaagttacccagaagatccagctaacatcattcatgaaggtggctacactgaacaacagattttccatgcagatgaaacaaccttatattggaagaagatgccatctaggactttctgagttaaaaaggagaagtcgatgcctagcttcaaagcttcagaggacaggctgactctcttgctaggggctaatagagctgatgacgtgccaaagttgaagccaatgctcatttcccattaggagatcctagggccctgtgctctaaaaatgcaacagcaaagttgggatgacagcacatctgtctgtagcatggttcactgaatattttaaacccactgttgagacctactgctcggaaaaaaaagattacttttacaatgttatggctcattgacaagagctctgatggagatgtagaggagattgatgttgttgtcatgcctgctaacacaccatccattctgcagcccatggatcaagaaataattttgatgtttaagtagtattatttaagaaatatattttgtgagcctatggctgctgtagatagtgattcctctgatgtatctgagcaaagtacattgaaaacctcctggaaaagattcatcattctagatgcattaagaacattcatgattcatgagaagaggtcaaaatattaacactaacaagagtttggaagaagttgattctaacccctatggatgacttcgaggtcagaacttcagtggaagtaatcgcataagtggtgagaaaagcaagagaattagaatgagaagtggattccgaagatgtgagtgaactgctgcaatctcatgatcaaacttgaaccgatgaggagttgcttcttacggagtacatgaagtgctttcttgaaatggaatctactcctggtaaagatgctgtgaacactgttaaaatgacagcaaagaatttaaagtatgatctaaacttagctgataaggcagtggcaaggcctgagaggattgactccaattttgaaagaagttctactgtgggcaaaatgctgccaagtattgtgtgctacagagaaatctttggtgaaagagtccatcgacaggacaaacttcattgtcttattttgagaaatagccacagccaccccaaccttcagcaaccaccactctgatcagtcaacagccattaacatcaaggcaagaccctccaccagcaaaaagattatgttgaaagctcagatagtcatcagcattatttagctaaatagctaaagttgttttgttttattttgttttgttttgagacagaggctctgtagcccaggctggagtgcagtggcacaatctcagctcactgcagcctccacctcccgggttcaagcaattctgcctcagcctcccaagtagctgggactaccagctagctgctaccaagcggtaggtgcacaccaccacacctggctaatttttgtatttttagtagagacagggtttcactatgttggtcaagctcttgaactcctgacctcaagtgacttgccacttcagcctcccaaagtgctgggattacaggcatgagccatcgcgcccagccctaaagtatttttaaattaaggtatgtacattgttgttttagacataatgctattgtacacttaagagactacaacagagtgtaaacataacttttacaggcactgggaaatcaaaaaattcatgtgactcgctttattgcaatatttgctttattgagtggtctggaacagaacttacaatatctctaaggtcagcctgtaccacaaacttggtggcttaaaacaacagatttgtattctctcgcagttctggaggccagaagtcaaaattccttatcactgggccaaaatgaaagggtcagcacctcctcactccaccccaaggctctagcagagtccactctcacctcccccagctcctgagggctgccggcatttctgggttcgcggacgcatcactctgccctccactccactttcacgtcacctcctgggtacctgtccagtctccctgtgcctcactcttagaaggatcctggtcccactcagaaaactcaggatgagctcctcctctgaaagttctctatcacatcttctgccacataaggtatattcacaggttccaagaagcatgtgggcttagcttctgggggtctccagcccatgacagatacgacatgtaaaagccaacctatctgaaccctgggttctaaatccagtatcatgtccagcttcctgaaagcctcagccaccttagataaacccggccaggagcctgcctgaagggcccctgggctcccctccccaggcaagactggcccaggtcgggagtggcccaggccacttcctggaaaggcaatggccggaggaggaaggtcaataagctacctgaagtgaagatgccccttccctgtcccacccaagcaataactgtggccagggacacaggagccaggatgtgtgcaggcccaggcggccagggctctctacctgaggccataggggtaggaggacctcctgcagccgcgctgaaatctccatgcataactctgaataataatgagaacaacaggtgtgtcattcattatctactatgtcaggcagcatatgcggcattttatgtgaatcttctctatcatggtgtagccaaaggtagaacgagcagcaccatctacagatgggaaaacgacaggtgaggtctgtggcagctgcaggggtgctgcgcactttcgctcaaatggccacagggcctaaaggctaaagcacaggttccaggctcacctcaccagctctgtggtcttgggcaagtttcttaccctctctgtgcctctgtgatattccatatagccacctccccactcacctcttcacccccaacttcccctcctccaccctgggacagccacccttccacaaagcaaacctgcctctgatcgtcattcagaataggggttataatgacccctacctcctagggtctctcaaatactgtatgtgctaccccacatcaagtacttggaacagtgcctggtgcgtagggggtactcagggtgggctgctggtattattaaaattcttgaaatccatcgtcttcccctagacctgctcctccttccagggccctgcctccgcaaagagcacgatgttctggccactcatccagacccagggcctgtgagtccacttggagcactccctccctccctcttgcatccaagcagtccccatgtcccatcagagctgggacttcatctttcatgtggctcctcctccccctgacagtggcccttgtctccctccagcctcctctgctctggcctggaccactccagccacctcctcactcaccaccctaccctcaacttctcctcctccaccctgggacagccaccttcccacaaggcaaatctgcctctaatagtggttaaggacacagagagggatggtgtcacagctgtgcaacctgggccactgcaaagggccctgagctttgaagggcccatgcttagtgctcttctgatgccatcttgaaattcttaaccattttttaacaaggagccccaaaaactacatagccgtttctgacaaccaccagccctaaccacagacttccatgggccgggcactgagcttagagtgacacgtgtcagctccctccaccccaccatgaatgtactgctatcctcactttacagatgtgaactgcccaagggcacgcggcttttccacggctctatggctgtcttaaatttcacttgtgagcatctcaacttgaaaattaaaagacatctgagtgcactgaatgcttcggtttagagcatgccagaaatcagagctggctaggaccagtcaggctgactgcgccagatcgctgcaccagtgagactttgtctcccagagctgacagcatgcagacaatgaggagtccgcccatcctccacatcacccggtgttcaacagggaagacacacaaatggccaaggagcacctgaagagacgctcaacgtcatcagccctcagggtaataccaatcaaaaccgcagtgagacggcaccacacaccacccaggacggctgcaatcaaaaaagcgcacaacaacaagtgtgggtgagcatgtggggaactggaccctttatgcattgctggtggggtcatgaaatgatgcagccactttggaaaacagtctggtggttccttaaaatgtgaaacgcagaatcaccctgtgacctcgcagttctactcctaaatatgtaactgaaagatgggaaaacatatgtgcacacaaaaacatgtacacaaacattcatggcagcacgattcctaacacccaacatgtgaacacaacccaaatgtgcatcagttacagatggataaacaaaatgtggtctatgatattccatagagcagaatagtatttggccatcagaaggaatgaagtctcaacacctgctacgacatgaatgaacctggaaaacattccactaaatgaagaaagccagtcacaaaataccacagattgaatattccatttagattaaatgtctagaatagggaaatccatagggatggccaggcacggtggctcacacctgtaatcccagcactttgggagggcgaggcgggcagattttttgagtccaagagtccaagaccagcttggacaggatggcaaatccatgtctctacaaaaaaaaaacaaaacacaaaaattagccaggcctggtggcatgcccctgtggtcccagctacttgggaggctgatgtgggagaatcacttgagcctggggaggctgaggttgcagtgagctgtaatcacaccactgcactccagcctaggtgacagagtgagagcctgtctcaaaaaataaaaacaaaaaaaaaaatcatagggacaagaagtagatgtagtggttgtcaggggtcacgtgaaaggaagagttggtggtggggactgttaataggcattggatttctttctggggagattttaatgctctgcaattagatagtgatgatggttgcataacactgtgaatatattaagaatagcttaattgtacactttaaaaggccagattttatagtacatgaattatatctcagtaacgctattgttttaaaaatgttcatgtattgggttgaatagtgcttcccccaatctcatgcatgtccttcccacaatctcagcttgtggccatatttgtaagtagggttcctgcaggtgtcatgagttaggaggaggccatgatggactagggtgggccctttattcagtacagctggggtccttataaaagatactcagacagacgcagcaggaggagtccacatgacgatggaggcagagcctggagtgacacagccacaaaccaaggagccaaggacagccgccaccactaggggttgggagaagtgaagaacgatcctccactagagctttcagagagagcatggccctgcccacaccttcatctcagacttctggcctctagaactgtgagagaatgcatttgttttatgccacccagattgtggaaatttgttacaccagccctaggaaattgtgtgtgtgtgtgtgtgtgtgtgtgtgtgtgtgtgtgaattattttcagatgacgaaactgctgatctaagaatcacacctagggtaaccccagcttagtgcaggtcctgaagccagtctaccagggtttgaatcccaactctagtatgtactaaccatgtggccttgtgcctcagatgccccacctggaacatggggctagtggtggtacctacctcataggtacaacaaccccatgttgttatgagtagacatcagattaatataggtaaagtgctcacaagagtgcctacaatgcactctgtaatctttaagtttttctaccaccaccgatactaccactaccatcactctcatcaccaccaccaccaccactaccaccaccaccaccaccaccaccaccaccctcaccaccaccacattcccatcaccaccaccaccaccatcaccactctcatcaccatcattaccactccaccaccaccgccacgatccccatcattaccaacatcatcaccatcaccaccaccaccacttccatcaccaacaccaccaccaccacccttctcaccacctccatcaccatcactaccaccatcattgtcaagaccatcataatgctctccaccatcaccaccactccccccacccttctcaccaccaccaccaccatcaccaccaccatcactgtcaacaccatcataaccctctccaccatcaccaccactctccccacccttctcaccaccaccaccaccacctctatcaccaccatcaccaccaccactacctctatcactaccgccaccaccacgaccatcaccatagtcaccaccacctccatcaccatcaccaccaccaccattaccaccctcacaaccacccccagcacccttctatcaccaccaccatcaccaccattatcaccaccaccaccacctccatcaccatcaccaccaccaccattgccaccattacacccaccattgtcctcaacagtgtcatcaccaccaccgttaacatcaacaccatcacctctaccattaccaccaccaatcccaccacccttctcacctccactgtcaccctccttaacaccatcaccaccaccatccccatccccatcaccacccttgccaccacaatcaccaccacatccccatcaccatcccaccctcaccaccaccactacacttccatcactatcaccaccatcccagaaccaccacaccaccaccaccatccccatcaccatgaccaccatcacaatcacctccatcacctccaccaccaccatcaccatcaccgccaccacctttcttaccatcaccaccaccaccagcatccccatcaccataacccaccatcactgacaccaccaccattgccacccttaccaccactgccatcaccataatcaccaccatcaccaccctcaccaccatcaccatgctgaccaccatcaccaccacccccattacccttctcactactaccaccatcatcaccaccacatcatcatctccatcaccagcaccaccatcatcaccaccaccatctccatcaccattaccaccaccatcaccatcatcaccaccatcaccatcatcaccaccaccaccattcccactgccataccaccatcaccatcacacctaccactgtcctcatcaatgtcatcaccaccaccattaacatcaacaccatcaacatctccatcaccaccaccagccccagcaccctcctcacctccactaccaccctccttaccaccatcaccaccatcaccattatcaccaaccaccaccatcatcaccactaccaccactctcaccaccatcaccatcaccaccaccattatcactatcaccaccagcaggcattgccaatgtgtgtccagccatcaaagaacatcagcctagtggaaaggtagatgagaaacagagggaaggatccagagcccactgtgatgtaaaccgtctcgatccccccccaagtatgtgtctagtagggaatgccaagagcatgagtgcacaacagtgataggtgtgggaagacagagtcttcacatgtcttgaaggttggcggttcaccctcaaaagctactgaacccaggagtaccgtgcaggtaggactgtgcttctctcatctcaaatgccaactccctgcctggcacggaatcgaggctcgttcgttggctgaatgtgttgacaatccctgactgcacaaaaattacttcacaacccagtttatgcctccattaagtggggacaatgcctgtttcaaacctggtgatgtgtatattcttgcaaagccatgcagacatttaacagccaagcattactgatattttttattaataagcaacaactaacagaaagcagaattccttccatcttcccacaagctcccccacgtgatacctgattgttgttccctggacacatcccacaccaggccacgcaggaattctcagtcccactcttttctcttaaggtaaatccttctgaaacactggtccaatgcttctaatgtctaggatcctgtgatcaggccagcacagatttctctggtctgacttggcaggaaagctgctcagggcaaaggatgctttcctccatgctgcccgagcactggccgagaagccagccctcagctttacatcctgttcaactttcaacttccttcagctggcagtgacctggtcccctggcactcaccagacgatctgcagataacattaataaatcccagctgcagaaaacagtgcctgtaatgaggaaggactgggaatactggaaagacaagagacccaggccagcccatgtctaagtcccatgctgctccagctctggcctgggtttcttccagttacccccgagaaccccagcctgttctgacccctggggaggagagaggacacggccctggccccaactttaggtagctcacggccatctcatctgccccacccacacaggacattgtgcagggactgaatcagccaggggatgggagcccctaatggcagtgaccaaggtccccaaagtgaccttctgtccccaggtgctcagggccctaggactctgttcccagaaactggaagggatgtttgattgagaaaacttatctcacctgcaagctcagctcatgtggcatccttgcccaagatgccccaccctgcccaagatgccccaccctgcccccgtgatcacaccacaaacactgactgtgcatctcttggctcccagatcgagtgcagagggtgaaacaggaacagctgccgctctcacactacccaagatcagtcaaaggaggaatctcgtaatcagatgattgcactggggtgaggttggagctgagagcctgggggcttcctggaggaggtgatgccccagctgaaacttcaatgttagcaggaggctaacccgattaacaaaggataaacaatgaaaagaagaaaccaagccctacaagatgttcacgcctatctgtgtgggttcctgcaagcacaggaaaaagttcaggagatttcacctcccactggttaccatacagggggtagaatctggagggatggagagaaagaaggtctgttaatgtccttagtcttttctctaattgaatagttacaactacaaacactatttcagtgatcttacaaggcaatcaaactctaataaaaatgtaggggaaggaaagaaatgaaaatttgaaggaaaattggtctgcaagcaaagattctaaaaatataatgatttctctatggggagagaaacaaacttcgtcaaaagcctctggctttatgtcaaaactgctccccaagaggatgccaaatatgaactatggagcaagcattccactctgcctcaggtgaccaagaccacaggactgacagatggatacagcctggccactaggaacacctttttaaaaatgtcttattgcaaaattccaaagcctacagaaaagttccaaagacatcaaacaatgaatccctttacaccttcatcttgattcaccaactgtttaatttttccttatcccatttttctatctataaggatagatgtgtgtatttctatccttgtgggccatttgacagtaagctgcagacaccacgacatctcaccctaaatgttgtgacttttatctctgaagaaaaggacgtttataaaatcataacaccagctgggcatggtggctcacgcctgtaatcccagcacttcgggaggccaaggcgggcggatcgctcgaggccaagagtttgagaccagcctggcgaacatggtgaaacctcatctctactaaaaatacaaaaaaaaaatttagccaggaattgtgatcccagctacttgggaggctgagacaggacaatcgcttgaacctggaaggtggaggttgcagtgagccaaggtggcaacacagagcaagactccatctgaaaatatatacatacatacgtacatacatacatacataaaatcacaacataatgatcaaaatcagaaattttatcactgattcatttcctactcgaacatcaccaatcgttgcaataataccctatatagcaaaatgatgatgtgaggccttgatccaggcctcagaacacttattaatatgaaagagcagttgtaaacaggatgcagccaggtctccgtcagaggtattgtgaaccacagactccaaaagtaagtggaaaagtaaaatttaatgacaatcaggaataatcgccatcaccagggcaagagtcaggtgtgacatatgataagggagggctgctgggagggtccaggcacagcgagaaaggaccgtgaatccttggctgatgccagacctggtcttcggctccgtgtttaagaaatcagaggtcacgggccctcaggcccgatggttccctcttgtccttgggagctggccacatgcaccagagcgaaccagggtgcagaagaacaggcctgggctcgcagctctcaacctgctgggtcctgtggagaggtcgcaacactgctgcagccctcagtttccccatctctagagccttaagtcttccccgaaaccccccggagcagctaaaacacgctccgttaccccaggctctcctgaaaggactcctgggagtgtaaagccccaccccctccctgctcatacctcagcaccccaaactacaccacgacacccagctcccaggtgaccccgtcgtgtcaaggactggttccttctgtcgccccaactgttttgcaccctggccccttcctcaccctctgcccacccatgtggccccatctgcccctggactgtggccaccctcaaccatgtggagttctgacccgtgtctcttgatcttggtgatggccactgcttttctgagaaacaaaaaacagtaaaacgtatccacaggctatcctcggtttccccactgccctgcaggtaaaaaccaaactccttagcctggacaaggcccttcctcatctaagaccccacctcaccttcccacaagtccccccaaactcccctcacctgccaaactgaccaacatcagggggcagcaacacagcactgacacgcaggcaagtgacactctctgggcccgctgaggccctgaaggctcagaaaggttaaggaacctccccaaagtcacagaactcccatgtgatagaaccgggacacaagtaagtgagctccaaatggggtcccttcattccgcaataaaaagtaaaatgtttcatctctaccaacggtctctacattcacgctgcctctggacaaagcctgaaagaacagcaacacagcagttcagcgctgggagtacaggtgaatgccattttttctttttgcaacactttcaagaattttgtagacaattttcaaagttcccagtagcaatactgacgagaagtcagcagacactgagggataaggagtccccaagcatctcgctcatgactcatcactgatcttctctgcacaggagataaaaatggtagcctgctttcagctgaggactcactccagcatggctggcaccaggcaggatttcccacctacccagctccacccaggcagatggatgctgccttagaacaccagcaccctgctcgtgcctggggcatgcctgccaatccgtggctctctcggcacctggaaaagacaggattcaaaactcagacattgttttccaattaaagtagcagatgccttggaactctctttaaagagattaaatggctaaatgtaaatttactcaacaatcatcttgacccatcaaggcccttgtcctctctgaaccagtttcctggggttccatctagcagagataacggtgctaccactgtccacagggctgtaaattgagaatctttacagcagatgaggtcccttgctcattataaacacaatggtagtcagcatcattattgtttactgaaaaacctactaagtgccagatacttcccaggcattaaagatacagagatgaacatggtgtaatgctcccctggagtagtcagagatctagtgagaagaagggactacaaatctctaacaggcttgagtttgactttgagcacagtggggagccacggagagggttacacctgggtggaaaaggacagatcaccccctcatacgtttcagaccagctgctccagagtcaacatggaggactgcctggcagcaggttccacggggcccctgaaggcagagacagtgtttaggctgtgtcctggtctggtggggtatgaagatccctgaggtgaaccatgaatacaaacattttaggaggcaaaaccagataggacctccagcctagctgaacgggaccaaggaaggatttccgatgttcagctgtattgtacattttaatctatttaccaagctcctcagtactcctaccacaggacggttgttctgtagaaacaagacgcagcactgtaccacatcacccggacacactcagaatggggcaatggggtcagggaattaagggctgggagataactccatgtttacaaatggggaaactgaggcttgcagtggtagaatgactcacccaaggttccactgaacatgcaaaaggacccaggatttgccagcctgtgtggccagcaagaaattggagcctatatcaaagtggtgggaaaagctgggcgccatggctcacacctgtaatcctagcactttttgggggccgaggcaggcggatcacttgagcccagaagttagaaaccagcctgggcaacatggcgaaaccctgcctctacaaaaaatacaaaaattagccaggcatggtggcatgtgcctgtagtctcagctactggggaggctgaggtgggaggatcgcttgcatcggggaggttgaggctgcagtgagccatgatttgtgccactgcactccagcctgggtgacagagtaagaccctgtctcaaaaaaattttttttaaatgatcggaaaggtacaaaccttgttgtcatgagcagtgaccatgtgaccatgcctagacacccactggcatcctgaaaccaaaagggagcttcgggtaggagggtgttggtagacaaacgtcaatcttcccaaagggaaaaaacacttagcaaatattgatgtagagaagaagtgagctccaaagttggagaggactttaagaaaggccatctgatccgacctccccattgcacagatgggatgtggagtccagggagggtggggctaatccaaatgtacatagaaagacaggatttgaacccagcccctttactcccagtcctgagctctaattactctgggcctcaaacttagcctagtaaaggtttataagccacatcatcacctactccaacaagccctccatgtttgccacggcttctgcctctgaaaatttgggcctcctgggaagggtgtaagagaaagagcctgggcttccctgtcagttggacctagagtcaaatcctagatccaacccttctgctgtgtgacctgcatcatcacacctcacttctctgtcctgaggctgttgtgtggattaaacaaattaaggcacccactgcagggtctgaagcagagcagcccctcccacagacggaggcagatcatagccatactaataatggctgcatcccccaaacatcagtgcaacctcctccactccacccccaatgccactacccacatcagagccaccatcttcacagtgacctgggtggcccctgcctctgcattgtctctgagcctctgcacacgctgcaggctgtccctctgcccacaactcctcttccccagccccagccaagatgcctcaactcaaagttaattttgcacagaagaggtgagattaaccctaaccactcaatctcacgcttccacctccaagtgcatccggcttcacttccggctgcaggcttttaaagtcaaacatgactcctccctttccacttcctgtccagcccctaaccccgcctcgttggccacgcccacttcatgcttcctgtccccgaccctcctccctggaggggagggataggaaagaaggaaacagaagcccaaggctttgatatatttagctttgtcccccatgggtataaaaaaatgaccctttaatgttttgtatctcatttttgaattgagagacgtggctacctttcaggtaagcagcttttcctttgttaccctacgatatggtttggctgtgtccccacccaaatctcctcttgaattgtagttcccataatccccatgtgtggtgggagggacctctcgggaggtaattgaatcatgggggcagtttaccccatactattctcatgatagtgagtaagctctatttgatcagaactttaagtgggttctgaatatgttacgagtagcaattttatcagaaattatttgtgtctgtgggtgtgtttggtggggaattgaagtaggtggttttctgatgatattggaagcatttcatgaaccgggatatttcgaaactgcatctccttgataccgccaggtgaagaaggacgtgtttgcttcccctaatgccatgattgtaagttttttaaggcttccccagccatgcaaaactgtgagtcaattaaacctcttttctttataaattcccgtcacaggtatgtctttattagcaatgtgaggacagactaatataccctaccaaattctctaggtcatgtctccagagaggcttccactgacctcatccccacacaaacctcccccatctcccaacctcagagcacctcgtacttgattaaggtccctccctcttcacatgggattgttcaccagctgtctccctgccccggcacagtgcctggctcggagagcacactcggtcattcatttatgaattgtttctctggaatgtcttcagaatggattgccacatccaaaaagatcaggttacaaagctggtatagcatattcccaggaaaaaataaaactgggctatatgtccagagagtggttggggaaagactagaatgtgcttttcaaacctttgttgctctttttcatgaaatggtcttagaaggacccacaggcacacctaggtctcccatgccacctttgctgaaaccacctgggcagccctatgtggctggagagagggtgagattctcatctcaaagccccagattcactaactctaacccctaaatgactgcttaacctcgtggggtcttggtttcctcctaccatcttgcatggtggttgagaggcttaaagaggaacctaaagcacctgctcaggtgagtactcagtaaatgcaacagccaagaggcagactggatggaacaggacaggaaggctgagccccacacagggagaccctgccccatccaccaccacctccttcctctaccttcctgacaccccctacaggcaccgtcaagggacaaccctacaaagccacaaacccacaggaaaccaagcccattgccctgacacaaacctacctcctctgcaaaaggtgaccctgctcattgcaccaggcagagaacaagggaagggaagtggcccagcagtggccctgagtcaggctgcatgggtctcttggggtatcactcctgcccccagaccaaaagcaacagctaaaccaagagctgccactcaaaagaagagactattctatgccaggtagtatgctgggtacacctcatctcaatccatcctcaaagcctccttgtaaaacaggtagcaatattatccccatatgacagataaggaaactgaggctcaaagaggtgaagtcactttcttaaaatccatagcttgtaaatgacagagtcaggacttgaacccaggtctctctgaatctaagaccagttcccagctgcccaaagaactgtgtctgttttgttttctatccctaggaccagcagcatgcctgacatcctcttagaagccatgcaagaacatttgcagggataaacagcaggctccttcctgcacaacaagccatgaccctcttagaacaaagcatattgacagaaaattaagtgccactgaattagccccaacactttcataaacagcagttttgaaataccccagttcatgaaatgcttccaatatcagaaaaccaccaacttcaattccccaccaaacatacccacaaacagaaataatttctgataaaattgctactcgtaacattcagaacccacaaaaaattctcatcaaatagaaatgagagttgtttatcaacattcaagagaacataatgaagcttcctttagaacattctgtgcacgtgaagtcttctttcttattgagattttcactataaaatcttatcagctgctgaacaggagagaaacttggaggtgaggataggcaatggggaccgatacctgtgctacaagaagaattaagcaccataacaacacagacacccctctcccatcagataatttactacaattcaacaaacatgcaccaagtaataagtcaccatttatatagctctcactgtgtagcaggaactgtttcaaactgtccaaattacctagtattctgcagccctgtgacaagggtattcttagtacccccattttaatggaccagcaggaaggggtgaagtactttgaccaacatgacccaattagcaagtgggggtggaggttgtagcaagtggatgttgcagctaattcagtgacatttaattttctgtcaacgtgctttgttctcagagggccatggcacattgagcagggaggagtctagctgctcaagtcccaagcttagtataaaaactttttctttttcaactgctacttgctggctcttggccaactcattgcatcattttggaatctcccctttattaacgtgcaaagaccccttaagaagtcccagaaaaggccccagccatcaggtcgtttctgtctcacctctgctgaaatgagtcaagagactagcaagtaaccacaccaccaagaacaagaaggggtagtcagtgacttccaagcaaagggcaacttctttttgtggtttctacatcctttctatactcaccaccccgtgtgggcttgatatgactagatgctgaacagggcgctccttgacagacacctaccaaacacctcctgtgtgcacaaggctttgtgagatgtgctggtggacgcagttcacatttcttaggcttcctctcaagaaagcagttccagaaagggtggaggggagggtcatgctgagagaggaagagaccaggggctcgaagagtaacactaattacaggcctggagtacataaaccaagatgagcttactgccaggttactaccaggtcactatcaggttaccaccagctcagtacagaaggaagtccttctcaggtgcagacatttgcagagtccctcaatgtctcagtggctcccccatcccttgaggagctcctagccaagcaaaggagacactgtaacaagcccaggtgataactgggagaccagggcctatgggtgccagcgtggtgagggaagggacatccaaagtgggctgtggaaggggtgaaatcaggatatgcagatggaggagcaggggtcaaagaaaagtcaattggcatcagagagggagagcagcagcaacgcaagctccattcattcattcattcattcaacagcatcctagtgcctgttccatgccagaccctgtgctgagcctcaaacatgaatctcacacagccccttccctcacagagctctagccagcggggaagaagactgtgaatggcatcagtcacacactgtgaccatggctgtgacagacagatgtacagggagggacccgccctggccttgggaggatgggtgatgcccaaggagatgagcctgtgcagacaggaggaggaggggtctgggcaagttcagggaaagcagacgattcaataaggtaagggacagtgttatggagtgaatgtttatgtccccccaaattgatacattgaaaccctatggtgggtaattaggtcatcagggtgaagccctcatgatgagattagtgaccttataagaagggacaggaaaccaggctcggtggctcacacctgtaatcccagctctttgggaggccggggaaggtggattgcttgagctcagttcaagaccagcttgggcaacataatgagacctcatctctacaaaattaaaaaaattagtcaggtgtggtggtgcatatttgtagtcccagctacttgggaggctgaggtgggaggatcacttgagcccgggagctcaaagctgcaatgaacagtgattacaccactgcactccagcctgggtaacagagcgagaccctgtctcagaaaaaaaaaaaaaaaagaaagaaagaaagaaagaaaagaaaagaaaaaaaggagggggacacaagagagcttatttcctttctctctccaccatgcgagggcacagtaagaaggcagcctcctgcgaaccaggaagaggggcctcaccatgaaccaagttgtctggcaccatgatctcagacttccagcctccagaacggtgagaaataagcttctgttgtttcagcccctctgtctatggtatttctgctatggcagccaaatggtctgagacagtaggtaacagcaggagcatcaggagataaggccacatgtgtgatgacaaggagtctgtgctttatcctgggccagcggggagcccctggagcagtggagtgacagtgtgagtttcggaaacatatcaccgtttctagatacaactgctcctttccccaaacacttcctataactccacagccatcccgaggaagaagggagcagatatgacctggagatgcctaggaaggcacaggtccctcaaggtctgctcacagagacttggaggtcaggccagtgccagctcccaaggcagcccttcctcccgctcagctcagctcagctcagccagtgatggtcctggaggctccaggttcccaggtcccatcttagtaatacaaggactcttgaaggttgagacagaacaaagagctaaacatgatacaggcagataacaataccacagatatctagacacacagatacaggtgccctgcgaaggggtgctggctgatgtctaaaatggaacagggccaggtgcagtggctcacgcctgtaattccagcactttgggaggctgaggcaggcgcatcacctgaggtcaggagtttgagaccagtctggccaacatggtgaaactccgtctgtactaaaaatacaaaaattagccgggcttggtggcgggtgcctgtaataccaactacttgggaggccgaggcaggagagtcgcttgaacctgggaggcagaggttacagtgagccaagatcatgccattgcactccagcctgggtgacagagcaagactctgtctcaataaataaataaataaataaataaataaatttaaaaaagaaagtaaaatggaacagaaacttcagtactcagggtgctgggacttggttttcaaaccaccttccatggagtcctggtgctccttgaagatgtttgggagggccaggagtcaaaggtctggagcaacagatgcttgacttcttttttctaggtgtaataattttaaactgtgaaaacatcacaccaactcaaatgggctgcaaacccaatattaaccctggtagaccccactgcagggacctgggctgccaggtgaacactcagctttgtgcagggcttgggggacagcctctcctgtcatctccagtgaaatgcactctgagaatgcaagacaagtcactcccaaaaacggaatcacaaatgcggtatgcaaatcgtcacaacagaatattttcacaaccacaacaaagtccattaatactcaagatgccacagctgttcagattgcaactgtcaccctatacttttcgttttgaaagttgaattcatcagagcaacctcactgtcctcactgactgaccttataactggtaaatgttgtcagtttaaagtcataagataaatgtgagaataaaccatcacttctctgttttgtatattggagcagggtggtttagctatgtaaaaattttatttttgaaaagacttcattttgcagatgggaaaacaaacccaaagagaggtgagtgtatcacactgtcctgtgagtatcatcccttctcaataggcagaaaccaggtgcccagcacatagcagacactccacaaatgccctagggaaggaagaaccgctcccaggcaccacagccaggaagggggcatgcctcgaacacacgcctccctactcccagcccactgctggttttcagactctgccgccttccctcctttcctagaaatgacaatacagcccacactcagcatcacaaggagggagagagggcaaggcaagtgcagtataagagccagggtgccttccctcttcctcaagaaaatactagaagccaagcacaccctccaccctgagcgccagtgtgggatgggtgctatatggacgggaagagctgctgtctgcactctaggaaacaagggtcccccgcgctcacctgtagattcagcaagagagcaggggtgattgtgcctatcgaagggaagcaaccaattgtcaactattttagaaacagccaaacagaatgcataactacaggataagtggagtgatggttaatattgagtgtcaactcgattggacagaaggatagaaagtattgttcctgagtgtgtctgtgaggatcttaccaaaggagattcacatttcagtcagtggactgggagaggcagacctgccctcggtgtgggtgggcaccatctcatcagctgccagcacagctagaataaagaaggcagaatttggaaagagcagacttgctgagtcttccggcctccatctttctcccgtgctggatgcttcctcccctcgaacatcagactccaagttcttcagcgtttggcctcttggacttccaccagtggtttgccagggctctcaggccttgggccactgactgaaggctgcactgtcagcttccttacttttgaggttttgggactcgaactggcttccttgctcctcagcttgcagatggcctaatgtggggcttcaccttgtgatcttgtgagtcaattatcccaataaacttcctttcatatatacatctatcctatcagttctgtccctctcgagaaccctgactaatacaagtgggaaccagccctgtctgccctagttcttaaactggagagtgtattggaattgctccgagggctcattaaaagccagaccccaggggccgggcacggtggctcacgcctgtaatcccagcactttgggaggccgaggtgggcggatcatgaggtcaggagatcgagaccatcctggctaacacagtgaaaccccatctctactaaaaaatacaaaaaattagccgggcgtggtggcagacgcctgtagtcccagctacttgggaggctgaggcaggagaatggcgtgaacctgggaggcggagcttgcagtgagctgagatcacgccactgcactccagcctgagcgacagaggaagactccgtctcaaaaaaacaaaagccagaccccagctgcagagtccctgatccaggagatcagggtggggccagaggacctgtggttctgagctgctcccaggtgaggctgctgctggcccaggacctcattttgagaaccacttctcagatctgttcactacaaaccctcctgattaaggctcattaaggcaggtgttctagacaatacctttaacagcccacagccaagttttctatctaaactattaaaactacattgagaaaatatttatagactacaattaaatatgacactagttcagactggacttttttttaattacctcagtgtggaggtcatttccaattgtgctggacaataagagggagaagaggggcactccattcagtaatggagatgaaagtggacacagccagccactcaacacagtgtctggctaggggctacaggaaggagaacgaacaagttgtggtgagaattacacaactcctaagcagggaaagctcccagctgaagtgaggggaatgcaggaacagccgacgaggcttccctggagcttgccaggggcaggtcaggcggatgggcaggatgcagactgaggaggcacagcagggtggggaagtccaaggaatgggcattccaggaaagtgggatggtgagcaaaagcatggaagttggaaaaggaggtggttagagtcagggaagtagtcaagtagtcagtttgcaaaggcaagtgaaggggcaagcaggagtgatggaggatgagacaggaagggaaaagtgggggcctctggtgtctggctggcaagaactgaacatcagctacaggccaggcatggcttgatgctactgacttctaacttcattgcattgtagtcacagaacgtgctttgcttttttgtttgcttgttttctctccttttaattttattgaggttgtattagggcctagcatatggtctatcctggaaaatgattcatgggcactagagaagaatatttattctgatgtccttggtctagtgttctataggtttccactaggtctaattggtgtgcagtgttgttcaagttccctgcttccttgttgacctcctgtagagttgttctatctgttattgaaagtgggtgttgacatattcaactattgttgttgaattatctatttctcccttcacttctgtcaggttttttgtttgtttgtttgagacagtctctcactctgtcacccaagctggagtgcagtggtgcaatcacggctcactgcagcctcaacctccccaggctcaggtgatcctctcacctcagcctcctaagtagctgggactacagacacacaacaccatgcctggctaattttgtattttttttgtagagacagagtttcatcatgttatccaggctggtctcaaactcctgggctcaagcaatctgcccacctcagcctctcaaaatgctaggatttcaggcatgagccaccatgcccagcccacttctgtcagtttttgcttcatatattttggtgctctgttgttaggtgcaaatatgtttataattgttatatatttctgatgtattgaacttcttgtcattataaaatgttactttttatctctagtaactttttttgttttaaactcattttgtctaatatcagtacagccccttagctttcttatggttgctatttacctgatatattttttctcatcctttcactttcaatctatttgtatccttgaatctaaagtgtgtctcctatagacagtgctatgatctgaatgtttatgtacccccagaattcatatgtttctagtcaccagtatgatagcattagaaggtgaggcgtttggcaagtgattaggtcacgagggcgagccctcataaatgagattagtgcctttgtaaaagaaaccctagggagctagctcaccccttccaccatgtgaaaacacagcaagaagactgctgtcaatggggaggcagggcctcaccagacactgaatctgccggtaccttgatcttggacttcccagcctctagaactgtgagaaataaatttctattgtttataagctatccagtctaaggtgttttgttatagcagcctgaaaggaccaagatagcatatacttggatcatatattttatccctgacaacatctaccttttgactggcttatttaacctattcatctttaatagtattgatatagttggacttatgtcttccattttattttgttttcaatatgcctcacgtcatttttgctcctttattcttccattactgccttcttttgcactaaatgaatcagacaccgtgtttgccatgtaagtcaggagcaaggacttcaaagaggtatttcttttaaatgtagatagcagaattacctttctgacaatgttaagtttcttaaatggctaattttcaaatctgtcatttttttttctttttggttccagtaaatgggagccaatcaattatttatccaagagtctctgaacaccatctacaaaaatgtccactaccagcttcctgggttggaagattggaagtctacagcttgaccttcttacaaggaggcagaatggggccactgtattttcgagatcccctttgtgacatgtggtgactggaagtgtggagacagctcattgcttcagactaaggtggggagggatggtcaggattcagaacagaatccgcaatgatggcgttttcaagtgctgtggcactgttctcacagacacctgcacaggaggttctgataaggagaggtcctttctccacttccaacaataaacagataagacaccaccccaaaatgttcagcccacatccctacctaagagtgacttaatacaccccaaacctccttgccacttgacctcttagcatacccccaaagccctctgctcactcacaatgatgaagggaagctacaacccaggagcaaatgaatcgtgaaattccaaattagcaacttattaatctggggcacctgaggtttggggcacctgcatccctcccccatcttctggctagagcaccccaatttttaatatcctatccagcaataagacttgtttgtgtcttcagtctgaagtgtcttgcatttgtccctatagaaaaatccggggctctgcaatacacaggctctcacagacttggttcatcctgggtgcctatggtacttcctgggagagatagatcatgtcaggaaagcacccatctgcccagtggtttaaatagattaggcacaatgtgggggcatccaggccctttttcaaaataagatatctggtttgcaaaaagaacctcgtcaagccctgagcctggaaggctccaagacttgctgaggaaatccaattactgccgggcataatgagctcactcacccagcgccctggtccaacaaagcagtcctgccaacatccagaaagaaggtttgtcttccacagtgcattcggagggtatggcttgggagaaagagaaaaaccaggctaatggaataagaaatgtgaccttccgggaccacaggaatgcagtttgtttctgaagaacagcattctaacatttttctgctgccttaaactaaaagcaggctgcaccgtaaggtagcgaaatgccagtctgaagagggaaagggaaactttgagttttacagaaccttcgcaaatctcatctctggactgatacaacaatcaggggtattcccaccccaagcattatagtatctgaggctcagacaattgactgtcactagaggtggcttctgcagagaacagagtgaattttttttcagcgcagagtggacctgatgcaagcaatggcgagaacatactgtgatcctgctaaggtccctcccaacactgacattatgggaatctgagaccaaaagccaaaaatctattaaccacctactgtgcacattgccctggccaggctgtgggagtcccagtgtgaatcagaaagcattcctaccctcacagagccctctgtctaatggaggagtcagacaagtcactggcagctgcaatacacagtggctagggcagagggtggcgtagggcagtgagggccctggggttatgcctggccctacctggcccagcctggggatggagttttctgaaggaaggcgcatgatggatcttaagcacaagtggatggggtgggggaggcgaacaggcagatctatcaaagggaacagcatgtgcaaaggcctggctcagtcgagagcagccgggggactgtgtagctagacacaggctctgctgcaggcgtggcaggagagggaggcagcgtgggccatgccacactggcaaaatcagaggagagaagaaagccccattagtccattcccctgcccctgggcctgtctgaatctagccccaatgacttcattcactcaatcctcctttgtagaggaagtcagcgggtgtctccccactcctggggcccaagaaggatggagaagtggcacccgaggagcagttctcaggagagggctatggttcatgggggaaatgatgggagctgaattgggagcaggccatggggggggctgcaatgccaggctaaatttacaacatgacgttacaggctgcatatagatcataagatggttactatagtgaagcagattaacatatctctatctaacatagttacacatgttttgttgcaagagcagctaaaatctacttattcaacaaaaacccccaataaatgcaattgtattaacaaagtccccatattgcacttttcctctctagacttgctcatcctacactctttccataagtgaacagcacccttaggagcagccagaggtaggctgaacccgccactgccatttccacctgtgcaagctcagataagtcactcactccccagcaatgaggtggtggaggtccaaggagaggcctggggaggaaggtctgctgagcacaccccgcctcccacccccaaccccagcaggcggcacgatgccaggcacctgagggcaggtgtgcacaaggaaaataaggatgacagtgttagctgacgcctgcaaatctcaggacaaagttgccccccggcatctctccatgtggaacaagcacacacacccagtgacagggatggggtgataccccaggacgccagagctcccagggtgatgtgacatgtctcccttgtggctcctggctgggttgggaactcggcccatagtcccctcctgggtctgacagaaagcagtggagatggggtccagagcagagaggttgcatcaaacaagagcacaggcggcctgcaccacatcctgagagtcaactgccctcggcaatcagagctggtgtggggcagttccaggatggggacaaacagcagctttgcccatactgggggatgcagggagtgcagaaaatgaacgtgaggttggaaactcttcaatcctggtgcaattaatattgcaaaagacttacacaggctagagccactgagtggccaagaggcaatagagtggcccgacactcttgggccacgccaaagtcatgggcgtggatgccagtgagtgagaccccagtgtgtgtcaggctccagactccagacagctctacccctgcgctcctcaccaggccttcccgagggctcacagccagagacacagctcccaccgccagtgtgactgtcccctgcatgtccctcctgaggccctcagagaactcatcacgggccttagtggctgggtcagcctctgtatttcacctgtggaggctatgggtctcccctcccccagaacgtaagctgctgtgggcaaagaccttgccaccccttgtcctcatggggacccagatcctcgcagcgcacaaggtggccctcaaaggtgcactgtcattgtttgtcatcaggctgagcttcttgtttacagaggaggaaactgaagcacaaaaaccatttcattaacttgcctgaggtcacagacctcatagaaggcagagctggagggtaagccccatagacctgagcctggaccctgctgccctctggagcttacagctacagcagcaaggcccagtggaatacaacatgcacgccacgtgtaatttcacagtttcactagccacattttaaaaggtaaaaagaagatgaaattaataatacatttcatttagcccaatatatacaaaatagcattattttgaagtaaaattcatgtgaaaattattactaagatattttacattccgtttttttcatacgtcttcaagcccaggagtgcattttatttatttatttatttatttatttatttattttgagatggagtttcgctcttgtcacccaggctggagtgcaatggcccaatcttggctcattacaacctccgcctcccgggtttgagctattctcctgcctcagcctcccgagtagttgggattacaggcgtgtgccaccatgcccagctaatttttgtattttcagtagagatggggtttcaccatgttggccaggctggtcttgaactcctgacctcaggtgatccaccctcctcagcctcccaaagtgctgggattacaggcgtgagccaccgcgcctggccagggtgtatttttcactcacagtccatctcagtccacaggagccgcattgcagtgctcaatagcccctaccggcgagtggctactggaatgggacagctcagctccaggaggtcccctggtggcctcaggacaagtgtatgagtcacctggcattaggaaactcattcacaatcacaatgaccatgacttccacaagtaacaccagcagcagcaccggctgacaaacacccactgcacgcagacgccactgagcctgttttggttttggtctacatccaaaaccaaccccaagagatagggacattctctttatttcacaaaagaaggaagtgaagctcagaaagatgaaggaacgagcactcgatcacagagctagcagggtggagttcggaaattaagtcaatagcagtgattacttattgcacacctgctctgtgccaatgcccaaggctgacagaggaggagaaaccccacaggcagggttcctgccctcatagtgcttgattctagcttctggggaggggaaatgagaataaaatcatttcagatcatgatgattctcaaaagcaaacagggtactgatgggaaccaggggcacagccgctatctgggacagtcaaagacctccccaaggaggagaaatttaggctgagacattgtgatggttaatattgagtgtcaacttgattggtgaaggatgcaaagtattgttcctgggtgtgtctgtgagggtgttcccaaaagagattaacaattgagtcagtggactgggagaggcagacccaccctcagtgtgggtgggcaccatctaatcggctgccagcgtggctagaataaagcaggcaggagaagatggaagagcaaacttgctgagtcttctggccccatctttctcccatgctggatgcttcctgccctcggacatcagactgcaagttcttcagcttttggactcttggacctacaccagtggtttgccaggggctctaaggcctttggccacaggctgaaggctgtgctgttggattctgtacttttgaggttttgggattcagactgatccgccactggtttctttgctcctcaacttgcagacagcccatcgtgagactttaccttgtgatcggtgagtcaattctccttaataaactccttttcatatacacatatatccgattagttctgtctctctagagaaccctgactaatacagacgtgagggatgaaaagaagccagtctgggccagggtagggatgaacattccaggcagcaagcagctcacacaagcgctctgagcagcaagaatccagcatgtttctgcaaccgaaagaaaggcagccagggctccctgcgctgtgccagctgcctctctggggcactcggctggctcccgcatcgtccctcctgcctcggggtgctcccatgctcttgcttggaaaatgaggagccgacaaccattctgcaggtttcaaggacaagtcaaggctgggagcccccagcacgatgctgatcatgggaggctgaactgatgcattagtgagcaggggaggagagggtggaagagcctgcagaataggacctgagcagccaaagccctgggaagaaaatgttaacaccctgagcactgcttccaacaccagccgcaaaggtgagaacgaccccaatgtccatccacagatgaatagaccattgtgttgtatacgcaccatggaatactactccgccatgaagaagaaggaagcaatgacacttgatgacacttgctataacatgggtgaaccctgaaaatatcaggctaagtggaagaagccagccacatacgatctggttctacatctgtgaaatatccagaacaggcaaatccaaggagacagagggcagatggatggatgccggggctgggagaggggaagtgaggaatgactgcccatgggcacagggtttgttccggagggaggaaaatgttttgcagctagattgaggtgacagttgcacaacatcgtgaatgcagtaaatgccaccgaattgtaccattgaaaacggtttacagtaaatgaatttcacctcaatttttttaagaaaaagaaggggaaaaagaattgcttcaatggaagacacaggttgtgatctcattcaatacagtcccatgtcagaacaagcagagaggggtgaccagccaccagatgcaacaggatagggtgagagaagacaggagacagaagctccaagggtaaaagatagtggaaagctacttaccagctcactccttgcctccactgtcaactcctcagagtcctcatggaaggaaaccctgtagtgatgtgtcccaccccctccagtgctgtggagggacccgggtcagtccaggctcctgactcaaaatgcagccaagggagaagctcagaggccagcacaccgagccagcgcctccctctgacctggcaggcataagggtatttctgccacaatgagcacccactggcagtccctggctggtgcacacagaacccctttcattccttaaagtggcccttcagccagtctaagccacggtgggagacaggagagcaggcagcctgtacccaggtcctcccaggccagttgggagttttaggatgtgcagtgggtcctgaggatgcttgcaagccctggaaaggataaaggggccacctcagaccacacagaggggaacaggctgacctaacacaagtgggcggtggtgcccaacaaagggacccgccactgcagctgctgtccacggcgtgatcctagactaggcctttcacctccgttctttagtctcatcctcacaaccgagggatgtgcagggaccagactggggtgatccccatttcccaaatgaggaacctgagttgcagagggttcagggggctgcagacaatgggacaagaatagccggtaaatggcagagccggtgctcaaacataagtctgatgtcaaagccttctctgctaaattgtgatgccactaacatttgttttattccacaaaactcccacaagacagcacatggcatcagtgaagaatgtgggctgcaggtgaggatgatagagagttctagaggtggatggtagcgctcgttgctcaacagtgtggatgtacttcatgccactgaattgcacacttagaaatggttaatatattaaccatgattaaatattttaatatatttagtacattaaccatgatgaaaaaatattttaaaaaatgatcaggtgctaggccatcaaggaattgtcaacaaatttttgaaaatagatatcacacacattctcttaacatggtaaaattaaattagaagctaataaaaatataaatctccctgctcctgtcccctcccccacaaaagaacatgggcttcttggcttcaaatccctgctctggaacatactcgctttataatccctggcgagcttcagagcccctctatgcgcatctataaaatagaaatgcaggtgtgcgcctccctctgggactgaatgggttcagtcagaccagggacagcacagaccagcgggaggcaaactcctcctggaaaaggccagggagtaaatgtctttggcttcccagatgtctcccccagctgctcagttctgccagtctggcacaaatgcagccacagaccatacatacacaaatgggcgtggctgtgttctaataaaactttatttacaaaagcccctggcatagatcctggcacttgctaagtgccattcacacatgttaactgttataatgaagaaaaacagcctttctgtccattcacctctacagacttatgaaaggcataacacttcgggttgcagttctgaaaaccaatactaacatcaaaggcaggagggatgcccccggccccactggggagctgcccctcccacactctgaactgcctctaggtgctttcaccacgggccctttctcctctactttccagtatgaggttggtgcaaaagtaatggcaaaaaccgtgattatttttgcatctaatagtgactgtggccactccctgcaagcgctcctgcgtcccacctcctacagggcttcctaacccagcccttcacagcatgaggcccccacagctccttccctgtccctgcccctccctgctgatccacagccccctgcacagtccacctggcctcagaaaagaatgagcaaagaaaatactttctgaaggcatccagggctagagtcaggatgctgtggtcccaccagtggccagccctggggtcactgtctgagcctccacttacagcaacaccaatggccactacggacatgacggtgacgtgcttccattaaaagcaccaagaaggggccaggtgcggtggctcacgcctgtactcccagcacgttgggaggccgaggcgggcaaatcacctgaggtgaggtcaggagtttgagaccagcctggttaacatggtgaaaccctgtctctactaaaaatacaaaaaaattagccaggcatggtggcaggtgcctgtaatcccagctacttgggaggctgaggcaggagaatcacttgaacccaggaggcggatgttgcagtgagccaaaattgtgccattgcactccagcctgggcaacaagaaagaaactctgtcaaaaaaaaaaaaaaaacaaaagcaccaagaaggctttctgatttattctcatgccatccctgttggaaggtcattttccgttacaagggtcagtgtgctccgtggggcaacatctgaggcccggagtcagggagccccacttctgagtcccccagtgtcctgagacttggctccctctgcggtgttcacgtagacctcaccctgtgtggtgcccgtgcagcaaagatgagataacccgaggcagaagcgggaggttaagtgctgatatttccttacgtggccctcattccccttatccagacaaaagaagtgagtacaggggctaagcgacttgcccaacgtcacactgtcagtagggtgggagctggtcctcaacacagttccactgacctagcctggtccctcatacctctcagcccaccacaatggtggccactgctctgatcattagtttcatcgttagctaaagaaggaccccaaatgtgggcgtgggagtttgctctgtgacaaggctaaatgaataaatattctcatagcttcttcaccatcatcacccctcataaatcggctacctttgctcagagaccacacctctgatccccacaccaacctagccaaagagatgccactgcccccttttatacaggaaatggaggctcagagaggttaatcttcttacccaagatcacacaatgacaagggataaactacaggcaagtccaacttcagaagccctgcaggttgatcccgtcgccactatggggagaggagtgacccagcagaactgggacacactgcagtcatcctcagactccccaagggaagcccccatttagttagaaagcccagcagggaggcacttgcccagtcacagctaagtgaggcagggcctgaatgggaaccctggcagtctggctcagagcctgaagagacacaaggtcccaccctcgaggagttaaacagatagccatagcctgcagtggcaattgctgctggcttaagcattagaaattgttccctctgccacttgtcccacagcccaatccacccttacacaccaagagagtggggccacggtcctgccacttcctcgtgcagccttcctggccgggccgcctgtccccatctctccctgcacatgactctctgacagcacgggcagtgtctgtgtggtcacctccccaggaaaacagagcccccaccaaagtgggaccatctctcaggccacctcactgtgtcccgtgtccccagtctctagtgggcaagatctgcttaaggaaaaactacacaaacaaatatcacactgtatgtgtataaaaagttctgagaacacaaatgagagaagcacacaatctttccggcagagtctgggaaaatcacactgatggaacctgagagctgggcttaatcatgaatcgttctccacatactcaagggaggggagcattgttttagacggggggaaaaagaagcatgtgggggaaaaacccaagtgtgaagacatgtctacgcaacacagaggcagcaggcgtggctgagacattgtggcagggagaggggagagatgggctggggaagccaggatgtgaggaactggtgaggtcgtgggggcggtgggagtcatgggtggtttgtgaaggaggaaaatgccagtcatctcatgcattgggtccacactgtgagcctttgggagctgcttactgcaaaaagactacagataagaattaccccagactccagagcagagatgttcagcattacagaccggtacacacctcaacagcaacaaaaatcttgcaacaagccacaagcctccactgtgcgctacaacatcagtctctgcagagctgcaggtctccaggagggtggaaatgccctgctaggaaaggattctaattcccccactctatccccgaatgtgtccctcctccttgcccatcccagctagtggagccaccacccaccagcccagggtgctacaggaagggccagctcctcccatggcctcgccctccacaccagcgggttactctgacttaggggggatggccctgctatgcccaacattcactgtgggtggagccctgggagaggggctgaggctgcccctgccctcctccccacctcctcctctgctctggaaggcagaggccatcagatggtaacagcatcctgggacagcgccacgttccaggaaagctcaggaggggcaaggggatctccctgactacaaggagctggccagctgaagttagggcgttcgcggagagagcacagcactggcaaaggccaaggacagtgtgcctgcgagtgtgcgcagatggggcgggcggcggaggagggctggcggttagatacagtatcgctggagctcagagagccgggcagaggctggcggagagccgaggctggcccagccttcaggagaccggcgagctggggtgtgtgggagcgggatgcttctaaggcgaaaagaagcgccagcctcgtaagcggcctctatctgggctgcccaggccggatgctcaggagcccacagcaggggggatggagcgaaggaccgaggggctgggaggcgaggccgcagcgcactgacgcaggccagcgaggccgctggccccgacgcagggcgcccggcaaggtgtctggcaccacgagagtcaatccttgcgcgccatctccggaggccagtgcgcccagggcgcgccggcccggcaggagggtgggtgccagcctttcttcccatctctcgagcctcctccccggcgcccacgtgggcggagcagcgcgagggtgtgcgtggcaggggccgcggcggcgtgtgccgtgcgtggggtggggtgcgggctgggcggcctcgccttcgggccccgcgccgccggggcgcggcccccagctccatcttctttgccacctgggcggagatctgggggactgtgacctaccctgcggaagacacggaggggacgggccggccacaccccccgcgccactccggcaggcaccgggtgggtccccctcccgctccttggcttgagggcggaatccggagaagagtggaaataggggtggcgtgaaggagagctgggggctgggggcgggaccgggagggggtgttgggggaagcgacgcagcggctgggagattttgcaagggggtctgaagaggagtgggggatgggtatggaagggtgggggaccactgaggtgggatgcgagagtggaagggggacccagagggggcgcgatggccggaggagggggagatggacgatggggcggggcggcaccggtcgccgcgtcccttgccgccaggtccgcccctcggtcgccgggtccacgggttccctctggccagcgctcgcctcccgccccccggcgcacctgtacccacctgctcggcgctcaggcccgagccgggcagcagcagcggacgtagcgagcgcagccccgcgccgcatcctccggccgccccctccccgctgcgagcttacgccgctgtcgccgccgccaccgccttaaaaaggacaaaacggaacagaaaatgaatgcatgcacaaaaaaaatcgtaaaaagcaattgaggaggatggcagtcgcgcgcgcggctcggcggggcgggagtcgagaggccgcggcactggtggccgcgatccgggcaggcggccggcgcgtgccgcacgcgggtggctgcagctccctcggtcgcccgcgcccggctcaggcacggcaccgcccctccccccggggagcccctccgattggtctgtcttcctgccagtcaggcaggagggcgcggcgcccgccccgccccgcccccgcccccgccccgggcagatgccgggagctctcctgccgccgtgggagggggagctgagctgccggagcgtgcgcactgggccagcgggcggccggggcagggctggggtcccggcgctgagcgcccccagccgcgccgggcagcctggcgcctcgctgagtcggagcaacccccggcaggagctttcaggctctggtcaagcctcgggacccgggaagctatccctgccctcgggggctcgagcctggagtggggcttgcaggtaaagcggggctggggccgtcctggccgtcagtggtcaggaagacgcagcgaccccggagatccatgtccccctctgtacgcatgagaggtctgaaggtcagaggttaaagcgcacgctaacggcggcagagccagcaagcggcagagctgggcggatgccagcctagggagcctccccccaccagcccaggctgcccccagcaaagccacatcagcaggtcatagccaaatgaaagatgtgctgtcgagctgagacttgggaggggcaggactcagctgggcaaacattcattcagtgtcattagacaaatatttattgagcacttgctgtgtgccaggtagtcactaagatgtggggacaccacagtgaacagcagagaggaagcggctgcccaccagagcttactttctagcaaggagaaggcagggaagagcacccaccaaagggagcagcatgggggaacaccctgactgctgtgaacgggacatatttgagaatctgataaaagtatctgggccacagaatggtgagagggagtgtgtggaagatggggggcgggggcacagaggggcagcacttgcaaggtcttgcaggctggcgagagtttggagactgtctcacctggaaggtggtcccatggaccattgtcagattgatattttttaaagtgcatcagtcaggataagctatgttagccacagtaacaaccaaacccaaatctccctggtgtgtcttgcccacatcatacatcctgcctcggtcaatggggctctgttcatcagagtggttgggagcccaagctgctggggctgtctgccagccgagcacccacatggtgcagcaatgtgaatgaaaggtgacaattatgctggctttgaaggcttcctccccgaagggactctcgtcacttctgctcacgtttcattggccagagcaggtcacatggccatgcctaacttcagaagaggaggaagtgcagacctctaaggttcagggggtcaggaggaactaggatatctgtgagcagatgtgagactatctttagcagatgccctggctgcccttggggcatgggctgaagtagtcaagagtggggacaaggaggcagtgtgggggcctcctccacgctgatacagtgaagtatcagcg

SEQ ID NO: 290 - DNA, 99320 bp, Homo sapiens
  source 1..99320: mol_type = genomic DNA
ggtcttggaactgcaagggagcggagtgtacactggccaaaggtggaaggtgctgaccagtaactgcttggaagcaaccaccgtgtttcaataggatctcagttgcaatccactgcttgtgtgaaggagggctgctgattcagcagcaaaatggttggaaataaaatggaagaaatgaaaagtagaacatacgagtggtggcaatgtttatttcaacaggcagagggctgggtgtctccatgcaggaatccatgaccctccctggggggctggcttccaataacattacttcccacttcccgagcgcttactgagtgctgggcgcctagcttttgaattcccacggtaaccctatgggaactctgccatctccattttacagatgagaaaactgagctcagggacattaggtgactgcccaaagccatactgctggtgggccccggagccaaggtttcgacccgaatctcttgaggacaaggtgcagttcctttggcccacacatttacaacagagaaatttccatggacatgaaacagcccagagatattatttcatacccatttagatgaacaaagtaaaataaatggaaagaaaatcagaagtttgaggacaccagtgctggccaggaaatagagaaccacaaacccaggcacactgaagggtgagaggtcagttgctccaggtgtttggaaagcaatttggcagcttccaataaagtccaagacgtagctggtccaatgatgccaccgcagacatttagagaacttctgtagaggggcacagggagacagcgctagaaagctcaatgaatcactgtaactgcacaaaacaaaacaaagccgaccgccctaaatgttcctcattgacagtgggtgtatgaggaggtgactgtcctcctggctgctggtactctggggagggagctttggtgcccaaggcaagagactgaggttgaactctgggactcccaggaggggctgatttttctgagagccccgtgagccaagagtggggaccatcctgattctctcggacaggggaagatctgagcagggctcctggctgattggaggctccgaatcgcacctcttctcctgtcctaatctcaggctccaggcctggcttgcagtttctggctcaccgcgctgcggtcaccggcccacactcccaggagcgaggaccctgggcagcctccacacccccatcagcccactgcaccggtctgctgccatttcccgcacgcatttcaggagggctggggacgccggcttctgcctgaggatttatggtccaggaaatgcattttaaatggatcccaggatgctcggatccaagaatcagactctctcttgtgcgtgggaagaggggcggagggtgagagtatgtctggagagagacctagaaacgcccgaatggcggtcccactttgctccccaaaagcgcgaccgttccccgagtgggggggcgctacctgttggccagggcgcagggcgcacggaattcgggtgactttgctccaagatacacgcgtgtgtcccgactctcactcaatttataggggagagggactcgccaaatccctgttttctggggtaagcccccctccccccactcttggacccaagctgcccggaaggaagaaggaagcattgtttgtcaccggagaaaaccacctgtggtttgcaaagggcctcagtcgagtcaggggcaggcggggcagatccgagcccggcgggaggggcgaggcgcgggggcgggcaggggcgagggtaggggcgctcagctggcaggtcctgctctgcaggcctcaccgcccagctcccgggagggggccgagggcgccctgagtgctgcgcgccttcccatgacgcagttcctgtgcctttaaatcccactcccggagggggcgggggcgccccggctggaccccggtttccagtccggcgggggccccggggaagcccagggcggggagcgcggggctgggggcgcggagggcggggcgcccggggtccccgcccgcgcgccgcgccctagcctgctgggccgcgcccctcttgggaccgccgcgctccgggggcgggggcgggggcgggggcggggggcggggggcggggggcgggcgggggcgcgcgggcgggcggggtgcgggcgcgcgccgcgcggcccgagcgcgcgagccgggcccggagcgcacgccgccgccgccaccgccgccgccgccgcccgagccgccgcattgctgctgctgctgccgccgccgccccgcgcccggcccgcggcccccaatatggtgcagccgccagcgccgccgcccgtgccgccgccgccgcccgcgggccccgccgccgccctcgggcgcccgcagcgcggcagccgcaggtggggggccgcggcccgggcctgagctgccccccgcccggcctcggcgcggcgccctccccgcggggctgccggcgaggggccctctcgccgctgaggtggagccgcgggccccgccgccgccgctcctgccccctccctccctcctcccctccccctcccctccggtcctgtctccagcgggagcgcgagacgctggtcaggctccgcggcgcagctcgaaaaggaataatcgcccccgattgactgaaattcctccggagccggcgccgcggccgcccgcgcccgagaccgcgctccggggccgcgtcctcctctcctccggaaaacgctcgcgacccagggccgccggcggccgcgactctgctgtgtcgatcgcctgagtccgttttcaccgtttgcgggatctggaaccgagttacatgcatgtccagtgggggcaggtttaattttgacgacggagggtcctactgtggaggctgggaggacggcaaggcgcacggccatggcgtctgcaccggccccaagggccaaggcgaatacaccggctcgtggagccacggcttcgaggtgctgggcgtctacacctggcccagcggcaacacgtaccagggcacctgggcgcagggcaagcgccacggcatcggcctggagagcaaggggaagtgggtgtacaagggcgagtggacgcacggattcaaggggcgctacggggtgcgggagtgcgcgggcaacggggccaaatacgaagggacctggagcaacgggctgcaggacggctacgggaccgagacctactcggacggaggtaggtgccgcgggccgggccgggccggggcgggagggacgtgcttccgatcgcgccccttctgtggatctctggggaagttgagctgcgtcctccggttgggccgtgggcaccaggggcctttcccgggcttccctggaagccacggcggctcctggctacaggttgccccgctgcctggtggggacagtgcccctgtgccagctgaagggtgttgggggctttccaggggcagagccaggcggggcccagcagagcctccgtgcgtcggacacagcaggccggagacctgcgggaagggccaggctgggcccgcggccctggggaacccagcaagggcagagggggctgggagaagggcccctccccttgttggctttgccccccaccctggaggccgcccttcgatcaggccccagcttcgcttctggtgttcctgcggcgcccgagggccttcctcagccccgaatctgcccaagccgagagaaagggagtgatggggagcgctaggggcgggggatgccaacccgaaccaaaacagccaggcagtacacttctaggtggttggacgcggactagcgctgtcgaagcaggctgctggagggaggagggaggcccatctgctcagtgagagcccaggaatctcgtctttcagtggctgcatcgttttcaccattagttgagggaatcgatctgtgccttcattctaagatgccaccgcattcggggcagagccggggccggaagccagggagctgcctgctgctgctgctgctgctgctgctgctgctgctgctgctgtaagatggtttctgtgcagggaaccttggccggctctgcagctgcccgcctgcctggactctccgatatccactcctcagtgcacctgacacgcatggagccggtcctttcctggaagccagaccccaaacaaactggcttccccgaccagtccactcccatgtgggagcttatcctcagaggcactgggtcctctgcctccctcgggcggctcgcctgtttcaggcatggatgcctgggaagggagtgagacgcagcaatgacttgtgcttctgccgagaataaaaatcctgagcgtacgtgtgctctagtcctccccgcccgctcgctgcctccgagtctcatgaagaaagctcggaacacctgctccacggccacatccaggagtggcagggggctggagagtaattattattttggcttatgcaactgaaaagcagggttcgttattacccgaagaggaggaggagtctggggcagttaattatataatgctcctgcctgtcaaagccgtgcccagccccggtctcaggcggccttttctgtgccgttgttgttttcatggagcaggttggagagcttccctgaccctggggcgctgagggccgggcgggagcagacggtgctcccttggttccaggctgtgggcctgtgtgtgtgtgtgcgcgcgcgtgcaggcacagggaggcccgggcagcagatgtgggtggctgagacaggcaggcagcctggcgcttccagctgggctgtttggagcccaggggctgctatcacccccaggctctggccaggaggctctgcagacctgtcctccagaggtgctcctggctgagcctgctccaggaggactgtgcaggccgggctcacgcagggcatggggacgagaggagccagggctttcgttgtctctgaaactcctcagaatatctgggggtgaggctgagcaccccactctgcccacgctcctcagacatctccagagtcctgaggaatcatttctttcattcaacaaatactgatggaatgtttgctatgagccaggtgtgccaggctctgggaaaaccacactgagcaaagcagacagccaggtgtcctaggctttggaaaaaccacactgagcaaagcagacacagatctttgccctcacggagcttacatttgagggagaaggagcggcgattatgttgtgactttttagggaagaaaggatctgattctgtggctggccgtgtagtttaggatctgacgggttaaggggagagatgtttttctctataggtccacttccctgggctctccactccagccagacagctccctcagcatcctgctcccctaagcccttcccctccttgtggtcctgcctgatcatgtccattctacagatgaggccagtaaggcccgggctttgtgattcaggagtcccagcctttggctgcagggatccccgatctgtctgggaccaaacccccctcgttcttgcatcacattgccggaagaagcccagattgtcaacatcctctcaaggggtatgcggttcttagctctcccataagcaaagccaggcagggatgcagatggggagcttcatggccggctctcccttttggttggcaacatggcatgacaggaaatagaattgacccttctggtcttgaggactcgggcctggacatctgggccacttttctggagggctcccagcttcctgttgggaagggggtgattatggcactgagtgtccccaggcagcccatggaaggagcctgcagggtgtggggatcgccagaatggggcagagacctccatgcctccttcccagtcaactggtgggtggtgacagccatgtcgcagtgaggaaggagttaatggccccagctccactctgacttttcctttgcacaagaagtgggggaatattgggcagccatcagcgaagctctggaacctcagcccagctctgggcgctgacttggggaaatggcgattttcatgaatgatgcaccagcggccagcgtattccacatgtagctggaattggtgtggaatttcagctggggacacctgtgccaactcctcctcctccaggtgtgtcctccccttagggtactccctgattgagctgagtagctcctaccgtctgcatggtgaggcctgggggtgtggggtacaggcacacttgcttccagtcacaaccccagcttgcatcctgggcttgaatccctgccctacatgccctgttttgtgaccctggttggattacttaacctctctgagcttgtttcttcatctttacaaaaggttgataacaatacctgtaaggtgggtgaggattaattgagaatggtgtgcgtggctatgccaggaatatagtaagcatacattattatttaccgttagttttttcattacagtttccaggcaatgcatgtcacttacaatgatcattattagaaccaacatctggacaggagactggtgatcatgtaaatgatgttaaatagcaacattagatacttactgtctgccaagcatgtggcaagtgttaaatgaattacagcccttaattcttacacctctagagggtgattttcttgttattctcattttccacactgggaagtggaggctcccagtgggtgtgggttgggaggaaccagcaggcgtcacactcaggacagccatcccagagcctgggcctttgctaggtacgtcgctctctaaatgcccctgtgcaaaaacacctcctgttctttcctctcgtttatatctctcgttctcttgtgcgtacagtggcccagaattgcaggtgaatgcccatgcacagacgggcaaacccatacactgcccaggacccctggccccctgaggcccaccatgcatgccggtgctgcaccgcacaggtatagatctttccttcgggtgctgtgtacacagaacccctcgaatcgaaagttaccccctccaataagccctcctacaccctgaaagatatgagtcatctcacgcccaagcctctccccctcatactcaggtcccgttcaccggcccagattcctcaacccacacaaatcacacacacccacagtcggaattcagatccccccaggcgcctgcgcacacacacgcgcacaaaacacctgccacccggagacattttccaccccgtcccccagaacgcagccactgcgcccttgcggccttgcttgctctccactggccaaggactctgaatctccaccaggcctgtaaacggggagctcagatgacagaggcagtggtgtgcttcgtttccattttaaacacacgtttatgctgttagtgcccttttagggagaaaaatccctcatctcaacaaaataaactaccatggggcgtatgctttgtgcttggctatgactatgactatgcaacaagtaatttctttttcaaatgagtgcccaggttagaaggaatcaggttcattggtgcggagattatgccaacagaaactcatttcagaaacaagaagcaagccctgagcagttggagacgaaagcgttttctccgagattctctttccgctacttcggggggcgggtggtgaaaggctccgtaaggtgaaaagagaaaggaagaagcaaacagctatttttttgttgccagttatagctgagaaacaaatgtggctgaagggcacccctacccacgttggccgtgaggccgtttgatgggctttgtgtgaggaatcctgagatgagctggccggggagtgaggaccggcacccgcctacagcagcgatctggagtagtgagtgagcagccccagctgacacagagaaggagagagagaactctgaccccttctcttctgaggacacccagccggagagagcaagaaggggtggagtgtgggggtgggggcaggagcctctgctgttcctttccaagactttttcttcctgttttccccaagcctccacaactctaaatatgacgagctctcaactgtgagctaataatgttgaatgtaacgccctttgtgtccttagatgacaaaaagacttgtgagtactagaggagagggtgatgttggtgtgaattttccacattggtccgtgtctccgtggactggccgcttcccccgctggtagcttcatggctgtgagaggccatgcggtggatggagccaccgctgcactggggtcctggctcgaacttgagtaaggtgctgtcttccaagtctggagaggagaggaggagagaagagaggcagtcccttcagcaccttggagagcgctcccggctgcctgcctgggttgggtggacggctggactcactttcgctctaggcatcctcttcaagccaaaccatctctccttgccagtgaccgcctggtcccggaccctccagcacactcaaccaccagaagtgtgcctatgcctgtgccagatgtgggggccacgcctgcgatcccaacactttgggaggccgagatgggaggttcacttgagcccaggagtttgagaccagcctgggcaacattgtgagacccccgtctctacaaaaaatacaaaaattagccaggtgtggtgctgcacgcctgtggtcccaccactcaggaggctgaggtgagaggatcgcttgagccccggaggtcaaggctgcagtgagccaagatggtgccactgcactccagcctgctgacagagccagaccccatctcaaaagaaaaagaagaagtgtgcctggtcctactcagtcggtgcatggattccatgctccaggaagggctgccacttggcatgcctgcctatgttttcacccctaccctgtcagtccttcctgaagaagtgagtgtcttctgaggtaacatcctctgctggtcaactgggagagcagctcccagcttgtggaggtgggtttgggggtgagactttatttttttgtttttatttatttatttatctgttttgagatggagtctcaccctgtagcccaaggtggagtgcagtggagtgatcttggctcattgcaacctctgcctcctgggctcaagtcattctcatgcctcagcctcccgagtagctgggattacaggcatacaccaccacacctggctaatgttttgggttttagtagagacagtgttttgccatgttggccaggctggtcttgaactgaactcaggcgatctgcgtgcctcggcctcccaaagtgttgggattacaggtgtgagccactgtgcccggcctagggtgagactttagtaagatgtatagaagttgctctgaagtctaaggtgtattcctgccataggatatgtgtgttcacttctcttggagcataacaggggtcataggtgcacagccgaaggcaggcagaggaatgatttgtctgtaccagtcagtgaaactgtttcaccaccattctctttacatctgcctcaatgggtgagtcctctagaccaatggtccccaacctttttggcaccagggacctgtttcatggaagacaatttttctaccgcccagggttgagggatggttttgggatgattcaggcgcattctatttattgtgtgctttatttctattattattacattgtaatatatagtgaagtaataatacaactcaccatcatgtagaatcagtgggagccctgagtttgttttcctacaactagacggtctcatctgggggtgatgggagatagtgacagatcatcggacattagattatcataaggagtgtgcaaactaggtccctggcatgagcagtttccagtaggctctgcattcctatgagaatctaatgctgctgctgatctcacaggaggcagagctcaggcagtaatgcaagcgttggagagcggctgtaaatacagacgaagcttcacttgcttgcttactcactcgccactcacctcctgctgtgtggctgggttcctaacaggcaacgaaccagtaccagccacatttcacgggctcaacagccacctgggactagtcgccaccatattggacaatgtaaatccagaacattccatcagtgcagaaagctttattgggcaggcagcactggtctggagtgtaagttccatatgggaagcggtttgtgtccatgctggtcactgccatgtgcccagtgactaaaatggtgctggcacgtggtggtcaataaatatttgtggaatgaatgacctgtgcaagtaaatgcggtagtatttggtaattttgtttaccgtcattatttcgtatgcctgtttcattgcaagaccttagaattggacgtagttaaaggaaagtttttccgtgagaccctcatgtccacaggtcagtctccctttacaattagcattaaaacatgcctgttctaattccttgatcagttttgttttgtggttggctttgtcattgctccttaagagactgccagtgtttcatatgagaaagatgatggtgttgaatgcagtgaataatggagcgataccagcagtcatgactgggaggcatttttggaccacgatttaatgagtagcattcattgcaaagtgcaaagaaaggcccatggaaagatgagtaccctccagtctgcttaattcctcactatctttttactgctcccttttccttggcttgattcgttcagtcattggagaagcatttgccaagttcagaccgtgttcaaggcacaaagacagaaaagctcaggtccaacctcagtgaatcagccttaagtatttgctgagcattgagtatgtacgcagtacagagtttgtggtaacgtggaagattggaaaaaaagaaacaaacacataaaaatgaaaatgcaagaaataggatgtcctatgttctaccaggaagaataaggagtctgaacagggatgcaaaaccgagatatatggaataattcagggtttctcatgccacagtgggggtcctgaatgggagcaccacagggcagggacctgaggaggggcagggcaggtgtgtgtgtccctgaaggagcggcagaggcttctgggggtaggcagtgcctgagttgagtctggaagggcagtagggtgagagttgttatcccaagcctgaggctgcagatttgttcgaggccatgtctccctcagcctcagcttccccatctctatgatttagtcatgacatttttttccttctcaacatgtgccatctccctcctacctatgaatgtcacgggtattgttctggacccagggaaggctcgctggtgcaaatgctttccaaaaacaccgagagtcgctctctctgctgctggtggagtctgagttgggcaggacatgggcccgcctctgtctgctgctctatgccagtgcttcccaagcctgagtgttacaagaaccacctggaaggtgtgtcaagacacagatttccagccccacccctgagtctctgggcctgggatgccacccaagaatttatatttcttacaaatttcaggcgatgctgaggctgctgatctggggacctcacattaagaaccacagtcctgggcttgtgcctcctaagcctggctacacattcgagtcactaagaatgtccctgggagacggttagaaatgcagcgtgtcaggcctgcctgacctccagggtcaggatgtgtgtttggagatgctcaggtggctgcagtgcaggagatcctgctttggtgcactcactttaaccctagctgtgcatgagcttcatctaggttgctttagaaaatgcagatgcccgggccccacccacaggtgctgattgaggtcctctgggtacagcctgggcattgggattctttttattttaatttttttcagacgggggctggctccgtctgtcgtcctggcgtgcaatagtgtgtgatcgtggctcactgcaacctctgcctcctggcctcaagccatcttcccacctcagcctcctgagtagctgggactgcaggcatgcacccccatgcccagctaagttttgttatttgttgtagagatggggttttgtcgtgtttcccagactggtctcaaactcctgagctcaagcgatccgcccaccttggcctcctgaagtgcttttacaggtgtgagcaacttttttacaggattacaggtgtgagcaactgcacctggcctgagattattttttaaacattccaggtgattctaacgttcagcgcaggttgaggaccactcatctggagcgtctgtagctggacatcacttgggagctttgatgactgacccatgccggggtccatccaagaccactgacactggaaactttaaggcgggggtctcagcctgagtatctggtcacagcaagcagggcctagagttgcagctgtagataagagtttttcacactctgggtcaagtggttcatgaaattaatatagtacattaaaatagactagaggccgggcgtggtggctcatgcctgtaatcccagcactttgggaggccgaggcgggcggaggccgaggaggtcaggagattgagaccatcctggctaacacagtgaaaccccgtctctactaaaaatacaaaaaaaatattagctgggcttggtggcgggcgggcacctgtagtcccagctactctggaggctgaggcaggagaatggcatgaacctgggaggcggagcttgcagtgagccaagatagcgcccctgcagtccggcctgggtgaaagagtgagactccgtctcaaaaaaaataaagtaaaataaagtagactagaaattttccaagcacaatacctacgtttctttctttctctttttttttttttttttttgagacagagtctcactctgtcgcctaggctggagtgcagtggcgcgatctcggctcactgcaagctccgcctgccggattcacgccattctcctgcctcagcctcccgagtagctgggactacaggtacccaccaccacgtccggctaattttttgtattttgtttagtagagacggggtttcaccgtgttagccaggatggtctcgatctcctgacctcgtgaaccgcccgcctcggcctcccaaagtgctggaattacaggtagcgtgaactcagctcactgcagcctctgcttcccgagttcaagccattctcctgcctctgcctcccgagtagctgggattacaggtgcccacgaccatgcctggctaatttttgtatttttggtagagacggggtttcaccatgttggccagactggtcttgaactcttgacctcaagtgatccgcccacctcagcctctcaaagtgctgggattacaggtgtgagccacctagcccagcctattgtgttgtttttgaatatatttttgatctgcagttggttgaatttgtggacttggaacctgaagctatagagggctgactgtgtatgataacctagaactgcaaagccagggaattcctttgaaagaaaaacactttttctttctaaaacatctattttgttccaagtattgtgctgggcattttatcatagacgttatatcttacattccttaagataatgccttgagataaggcattccgctcccatttaaaagacaggaaaggtgaggctcacagggtcacactcgctgagatcacagcgctgcaaacttgtttctggccgcagaattgtttccggcgctccgagatgcctttcttgatggagccagcattccaggggcccacttgctttacagatgaggaaactgaggcccaccaagggaggggccctgccccaggtctcacagtgaagcaggggcagagaggtttcactcccagcaatttgtaagcttgggggactgccagcgtggtgtggacacagagctgcgtgacccctcccaggataaaagcaggtccctgcagatacgaggagccgcgtgtcccctcccaggataaaggcaggtccctgcacacaggagctacacgtcccctcccaggataaacacaggtccctgtacacaggaggagctgtgcgtcccctccaaggataaaggcaggtccctgtacacaggaggagctgtgcgtcccctccaaggataaaggcaggtccctgtacacaggaggagctgtgcgtcccctccaaggataaaggcaggtccctgttcacaggaggagctgtgcgtcccctcccaggataagtgctggtccctgcacacacgagggtccgcgcgtcccccgcaggataaacgcaggtccatgcacacaggaggagctgcgtgtcctttcccaggataaaggcaggtctctgtacacgtgtggagctgtctgttccctcccaggataaacgctggtccctgcacacaagggggtctgcgcctccccgtcccaggataaaggcaggtccctgcacacgtgaggagccgcgcgtcccctcccgggataaactctggtccctgcacacacgaggagccgcgcgtcccctcccgggataaacgctggtccctgcacacacgaggagccgcgtgtcctctcccaggataaacgctggtccctgcacacgtgaggagctgtgcgtcccttcccgggataaacgctggtccctgcacacacgaggagccgcgcgtcccctcccgggataaacgctggtccctgcacacacgaggagccgcgcgtcccctcccgggataaacgctggtccctgcacacacgaggagccgcgcgtcccctcccgggataaacgctggtccctgcacacacgaggagccgcgcgtcccctcccgggataaacgctggtccctgcacacgtgaggagctgtgcgtcccttcccagaataaaggaaggtccctgcacacatgagggttggtggctctcctgagggttcacaggttcccggggacccatccacagatccccagataagaacctgtccatcctccccggggcctaagcgtgcccagattgatctcagtttgcccagtgagtagaaaaataggccgggatcagcagattcctatagacctggtggaggcctgggctggagtagacccaggcagagttggtctttcacctcgcccccttccggaggccccgtacccttggggtcagcatccaggcaacatgggatacccagaaccttctttcttgtcctgagcccttctctcccagctcggcatggacttgagtgacagctgctgtgtttctttcctgcccagtgagtggggccgggccctggagctttccctgttcatttgtttcgtctccttgtggggaaagcatggctcccccattttccagatgggaagcaggctcagagatgcaacagaagtgggaagtgatggagcagggactccatagctccagtcacgagtctcaaactctgtgcgcatctgggtcgcctgacccggcctccctgacccgggctgcccagaagggagcccaggaatgccggggagggtcacacagccagggccattcaatgcaggtggtgctgggaccacgccttgagaagctccagtcgccttccctcctctgcaatgaggcattgctagggggaggcgagtgggggaagagaccgggtctgttggggtcagccccgggcacagcacccgacagcagaggagacctccggaaatcatggctggatgggtcaatgagtggtcaatcaggcgagctctgagcgacaggaggggccggtggtgtggagagagggaagaagagcctgcaggagggagacggtgcgtgcaggggcaccacggccagagcctgcttggtgttcagagagccctgtggctgccgcagttgggagaagggcacggggtctgagcacagacagcttccaggccccagggttgggggactttgaattttctccagggcccgggaacgacattgtctgatttaagcagaacagcaacgcaatctggttttgtgtgtgtgtgtgtgtgtgtgtgtgtgtgtgtgtgtgtgtgtgtgtatttttttttttttgagacagagtcttgttctattgcccaggcgggagagcagtggcgcgatctcagctcactacaggctccacctcctgggttcacgccgttctcctgcctcagcctcccgagtagctgggactacaggcgcccgccaccacgcctggttaagtttttgtattttttttttttttgtatttttagtaaagacagggtttcaccgtgttagccaggatggtcttgatctcctgacctcgtgatccgcccacctcggccttccaaagtgctgggattacaggtgtgagccactgtgcccagccaggttttgtatttttgtaattacactttttattttgagatcaccgtagattcccaggcagtggtgaggaatagatcagagatccggtgtccccctcatgtggtctctcccgaggtggcatcctgtgcaactgatgacatgtcggaaccggatattgacgtggacacagtcaggatggggagcacccgcgccccggggtcccttgtgttgcccttttgtagccatacccgctgccctggcagcctctgagctgttctccattccttcagtttcgtcgtttccaaaatgctctgtaaacggaaaagtacagttcgtcattttggggctggctttcgtcactcagcctcatttgctggagattcttaggtgttgcctatatcaatagttcgttccaggctgggctccgtggctcacgcctgtaatcccagcactttgagaggcctaggcgggtgggtcacctgaggtcaggagttcgagaccagcctggccaacatggtgaaaccccgtctttactaaaaatgtaaaattagccgggtgcggtggtgcgtacctgtaatcacagctactcggaggctgaggcaggagaatcacttgagcctgggaggcggaggttgcagtgagccgagattgcgccgttgcactccagcctgggtgacagagtgagactctgtctcaaaaaacaaacaaacaacaaaccaaaaaaccaaataaaatagtcctttctttcttattgctgggcggtgtcccacggtgtggatgggccgtttgtttaaccatctgtcccttgaagggcatctggggtgtctccagcgtgggatgtcgtgaatttaaaaagctgctgccaactctcaggtccaggttttcctgtgcacagatgtcttcgctttcccccagtggatgccaggagagctggtgctgggccgtgtggaagttgtatggctgagttcacgtggtcactctggtgctggcagggcagggaaatggggggccagagaggaagctgggggtcatgggagggatgccacctctagggaggggtgcctgtgtccaaggagtggagatagtggctgggtctggtgggggctgtggaggtaggggggctgcatggtagggcagaggccaggagtctgggactgggtggtcctgtctttgagggaatttggagaaggagcaggtgcaggtgcaggagctgagagtcacctgtgaaacatgctcagcagagaagctgtgcgcagccggggcaggggtgcgtccatggtggggatggtgtgtctgggtggaaggggcggggcatctcccactcccggtggcattgaatagtgcgaggggagtggctgggcgcggtggctcatgcctgtaatcccagcactttgggagactgaggtgggcggatcacttgagttcaggagtttgagaccagcctgggcatcataacgaagccccgtctctacagaaaatacaaaaattagctggggcatggcagcctgcgcctgcagtcccagccactccggaggctgaggtgggagaatcacttcagcccgggaggtgcaggttgcagtgagttgagattgggccactgcactctagcctgggcgacataatgagacgctgtctcaaaaaaataaataaataaataataaaacttggaaataaggcaaaaaatattatttaaagaaaacagaaagtgggaggggagaaatgcacaggatggagcctaggggagccccaggactcgagaagtgggcagaggaagaggaggcaggaggagggagggaggccgggcagcagctgggggaggagggcgtggacaggccgggaaaaggagcaaaggcaggatgaggacacaacactggcctgtgcctggccttgtggcaaacacctcatcccttaggccattggccatcgtccctgctgtcctacagccccgagaggccaggtacgtccatgtgtcgtgcccattttacagacggtggagctcaggcctgggagacagactgacagtgttcggcactaactccaccccagcctttttccacctggccacactgtttactcgttcccgccagcagcatgggggctctggtgtttctgcgtcctcatccgcacctgtcatcgcctgtctttttggttgcagccacttctgggatggatttcctggaggctggtgctgagtctctctaggtgcttgtcggcccattggtacatctttggagcaatgcctgttcagatccttgcccatttaaaaattgggttatttcaggccgggcgcagtgctcacacctgtaattccagcactttgggaggccgaggtgggcagatcacctgaggccaggagtttgagaccagcctggccaacatggcaaaactgcatctctactaaaaatgggaaaatgagctgggcgtgatggcaggcgcctgtaatcccagctactcggaagctgaggcaggagaatcactcgaacctgggaggcagaggttgcagtgagccaggattgcaccactgcactctagcctgggcaacagagtaagactctgtctcaaaaaaaaaaaaaagggggggcactgcgcaccagcctgggcaacatggcaaaaccccatttctataaaaaatgcaaaaaattagctgggcatggtggtgcctgtagtcccagctatgaggaaggctgaagcaggagtatcacttgagctcaggaaatcaaggctgccgtgagctatgatcacgccactgcattccagcctgggtgacagagcgagaccctgtcttaagaaaaaaaaaaaaaagaaggattatttgtcttcttactgttgagttgtgacattttcgtaggctgtagacaccactgtgagccaccggctcccctgcaccccagcccacctggctgcaggctgcctgctccgttggaggttggacttctgagataaactgcgctgggtgtctgtctcttggctccagagtaccaggcacagtgccatgcacacagtaggtgctcagtaagcggcgacaggacaaagccaggatctcagtctgcggcttggaggggtctggggtccggctgtcactatctggctctgcttaccagctccggtcctcggacaccacgacggctgcaggcagagggaggagccacggagtctggggggatgttgggccacacaagtatctactgagcgccgactgtgtgctaggcaacaagctggccctggggacagtggtgaacaaagagccctaggacttcttggttgggggaataggacccgtcagtcagccctgcacagcttcctgcggggcacggatggggcgcaaggaaggggctggagatgccttctagggagtgaggctggtgagcgggttggggaggaaccatggggcctcccagacttcaggaggcgcatctgtgagcaccagggacagaaggaacagggccaccctgggacccagtgcgcaaggagcccaagggccctcacacgtcacccttgggtgtgccagagccagtccagttgttaagaaaaacaagagccggaggtaaaccccttgggaaacagaggtcccagcccacagtactgcgtgggagggagaagtgtgggagtcacctgggctctggggtccctcaggccagcaatggggactgggatcccagcgcaggctgagcctgggtggctatgtccacactgcagagacctatcgtgagcaagtttatggtgcattcctgtgtggaagagtacagcagaggccaggggggtggggctgcagcgacagtgaccaggagtcacccataggggcagggtcctggtgtcatgggccagagcgggccagagcggggacggggggcaaagggaaggagcatttgagcctggatgggggtgtggttagcagagaggtgggaggggagggagagagagagagaaggagagagagggagagaaggagagaagagagggagagggggaggggaagaaggagaaaagggagaggggtgggctgtgaggagagggaggggaagggctgcagagggggaacgtcagtcctgccatgggggggacgtgcgttgttcctcgcccctcccttccaggttttgatggtgctgtttcctgcgtttacaccacagctctttttgcgtctttccttggattccacacagcagccctgtgaggcgctgtcctcctgctgcccggaggaggagactgaggccagagatgcggcaaatttcccaaggccacacggttctgctgttggggcggcactgggcctccctgcccgcctgcctcagtctggccctgtgaagaggtctcttggaactgttaggagcattcgaaagaaactgggcccctgggctgggtacggtggctcgcgcctataatcccagcactttgggaggctgaggcctgagcacttgaggtcaggagtttgagaccagcttggccaacatggtggaaccccatctctaccaaaaaatacaaaaatcagccaggcatggtggcgggcgcctgtagtcccagctactcaggaggctgagacaggagaattgcttgagcccgggaggcggaggttgcagtgagccgaaatcgtgccactgcactccagcctgggcaacagagcgagactctgtctcaaaaggaaaaagaaaaagaaactggtcccctggagcgcaggggtcagcagctaacttctcgccctggcagctggacccgacttggcccagagtgccagggccagtgcccccatctgctctgtgtcgggaggggctgctggcaggaggaggtggccactccaaaatcctatagacggagtccgggggagggggttcgggacaggaacagcccagacctgggatccgcggctgcgcaaggggcttcagggtggtctgggcctggttctgagccctgtgaatccaaggccacaggactgggcctgggggcttctgaatccccaccagtgccttcttgctctcaggagcgttggccaaccccccaggccccagggcttcccctcgtgattctcctctgagagaaacacacccacctacagccgccagccaggagcaattgctgtgcaaacacccgggactgtctcagacggtggatgcaggcagccaagcccccggaaggctccggttgaagggccgggtttattcctccctgcaatgagggtggacactcccccaggaaccacggggcaagagggtgttgggaagagccccactagggtttggggtttgggtgggtggtggggaggggacagtctagggacgtagggctcactagaccaagtgctgttggaaagggggcgattctcctgtgggtgcgttggtcactgtcgcctgtagacatgggagacctgcaccaaaataatgcggagatgggtcaagaagcagccgcccctccccttagtcgagaggggggatggttggtgatcgtgggtggcacagtgacctgtttctatctcactctactgtgatctcagagtgaccttgtctggggtcactggggtgttctgggagatggtttatatccaacagaagaacgacgcagcctggcaggagctccaggtgtcaggggggggcccctttggggtggaggggatgcctcagagccagccgcatgccaccccacaagctacctctctgccgccgtctgccccagagctgcctgccttccgaggcctcagctggtcctgtgcgtccctgcgtctccaggactcttgggtgatggctcaggggaagtttccagaaagcccagccatttcctcctctcctcctgggcttgggtctgaggtcagcttcccagggggcacccaagcctccgtgagcaaggacagagagtggctggagtgagaacgggtgctgctgacctttggcggtgggagggtgtctccagctgtgttcccatttctcagtgactaccaggtgctgtggcccttggctgcagaggggcgtgcaggcagcctctccttcctgtgaagcagcagctgtggcagggccgggaagtagagctcccctctgtgaggctgtggctggggtaggaggagagctctcccttctgcgaggctgtggctgggatggaagtctgccagaggcgggctcagaagaagttccatgaggaactgagggctgggacctgcaggaggagctgagggtgcatggggtctgggggagccccagagatggtcagggtctcctcctgataaatcagacccccccccgccccaccctgccgctgagaggcctggtcctgctctaaacctggagtggatggggagcgtgggctggggctggggggctggggaggtggtgtagccagtgccctgccccaactcagcctctggtcacccttccagggctggcaaggcattgggggtatgagagggccctggggtcccagggtctcagaggacttgccttctctgcgatggccgctactacctgggtcccacaggggggtaagttcagagggggacctggtggaggtcggctgtgggcaggggagccacaggagtgtccaggcccctcccaggccagccccacagattctgaggcagcagtgggggcctcaatggaggagtccactctgcccaccccggatactgcccagccagcctgggttccagcgtgggccaagctctcgtcctggtctcctgggagctgtgtggtcctgcaaggacctcagcaccttccttgctttgagcatccctcccccaaggcctggctgacactcggagccagtatccatagagggctgcaggggcaggcgagggtggacactgatgtccttggctcattcctccctggctggctgctctgatgtccagcagggtgggcgtgaggctcatggggggctccccagccagggcaggacctggggtaaccctatcctgggatgtttgctcccgctgtgtgggggacatgccgtttccatgagtgacagagtcaccgatgtggccagtaccactgtgggcttgaggcatcttctagtttaaggaaatgttaaatttcaagtaaagcttagtgaaaataaggatgcaatttcattccccaacaaaacaacctctatttccttctgtgaaccccttgggagctgcagaccccgagttccggaccccctcacctcactctcctccttcggagccaaagtggtgcctgaaatctgaggccccatctctgagtcctgcactggtcctggcccgaacactcccccacaacgcatgggccacaaggaccctctgggcagattttggggtgtctttggaggtttaggggcaaagcttgaaaactgtggggtcctccctggggaccacatgcccagctgtggggtcccccgaggccgcagagcaagctttctggaagatcctcctcctttgagagccaccatggagcccccataatgggaatggagggtgttgccattaaacatggccttggcgttgcccagaagtctaggtgtgtccctgtcagctgggaggggacagggtaactgtgcggccctccccagggctgaggctggggcagcctccagaggccaggttgtcgctgtcactccccaaatggagggtccccctcattccctgattgcagaaaaagggctccagtaagtctggcttttaaaaaatacagctttgctgacatatgtttcacacaccgtacaattcacccatttaaactgtacagtccagtggtttctagaatattcagagttgtgtcactctcaccataatcaattttagaacattttcatcgtctcaagaagaaaccctctagctagctaccccttccccattcccacggctccccacccctggtgaccgagactccattttctgtctttgtgggtttgctgctcctgacgtttcgcatgcgtggagtcatacgctgagaggccttttgtgtgtcgcttctgttgcccagcgttgttttcagggttcacccgcgtgggagctgcatgagtccacttcttcgtatcgctgagtaatattccactgcggggcaccgcgttttgtgtgaatctgccaccactcaggatggctcatgggtggaaacagcctaaagctggcagaggtttgggctgtttgccagccctgggtcacttttgggctgtttccacctgggggctatcctgagtcgtgctgctgtgaccatttgcgtcctttcgtttcctcctgggtggagattgtggggtggcctggctgggtcgctctgggcccaactctctgagaagagctgttgaacacataccccacagctttttttagtttttatttatttcattttattttttgagacagagtttcactcttgttgcccaggctggagtgcagtagcgtgatcttggctcactgcaacctccacctctcgggttcaagggattctcctgcctcagcctccgaagtagctgggattataggcatgcgccaccatgcccggctaattttgtatttttagtagagacagggtatcaacatgttggccaggctggtctcgaactcctgacctcaagtgatccacctgccttggcctcccaaagtgctgggattacaggcgtgagctgcctcacctggccttattttatatactttttaagacggagtctcactctgtgagccagcacacctggcccatggcttcttttaaaaagagacttctggaagctgagaagtcttttccagggctccacctggcgactgaccactgggcatggtgaggtctgcgtttggaggaagtggggtgacagtgacagctgtgactattggagcacacagtcggtgctgggcaggtgggtcattcctgaaccctcagtgtttccctcctcgggggtcctggccagtcactctcctcctccacaccagcccccagcagctcgcaggctgcctgggcccagccccatcatcagccgctgggcacccacctgagaggtctgaaccctgcccttggtgctgcacggtcacttgccattttcgcagaggggccccctgagcaggaggagcagggccagcatgcacactgcagccaaggtcccaagaaggaagtggcgaggaggaggaggaggactggccccacctgttgccctatgtctcacagcgcagactgggggagacgtgaggatctaacaggggttcctggggggccttcatcaagctgtaatgaatgttgtgccaaacccctgtcaacaccagtgggtacagcacagggttcaagggctgaagaagtgacccagggctagcaaaggagacccggggtttactgcgagccgtggggtggggagggaagtgcagggacgggagaaccgcagcggcttgtagacagcgcaaagttcctatggcatgttcaccccataccctcccctgatgacctccacctgccaaccttcattcaacccaaaactcagggcctcaagcccctgcacagcgcacgttccacgggacaggccaggggctcagaagttcctcatagccaaggaggcaatctccagattggccactcctggattccttagctcaggttgttcttggagtatgcgtaagttactgctatcgggggtgtttaccctccaacaggtgtttggtgggggaggagcctccttgggggtgccaagagcaacagcggccggggtctcatgtctgtggggccactcccattgctttgtgcttagtaactgggtcttcaaggcagccctgtggggtgggaatcatttttatcctgtgatatttcattgtgcacacgtgcagactgaggttgcttaactaccccaggccgcacagttatcaccatggagctgggatttgtaccctggtggcttagcacagagcctgagcacacaactcccacccgcctgcctctctccgaccgcgagtcctccaggaggactggggctctcctcccagcaccaccacggccattgagcccagtgcccaggagaccgaggcctgtgaggtttcacctggggcccggagacaggctccaagtggtgtgggggcccctgtgcccaggttttccccgaggtgccggctcatagctacacatgcccatgggcctgcctgagcccggtgctccaagccacaccccgagtgggcggcctccctgccacgcagtcctcggcctgaggccgccacactcagagccactcagcctatggggtggtgcatgtccagaaccctgacccttgggaaggttgggatggttggagatgcagatgttccaaggggaagtggcgggagcgggtgctggctgggaccaagggattctcaagagaagacgtgagcttcactcaggcacagctcttcagcagcaagagtgttggtcctaaaagatcatgtaaatagaggagggcatggtggctcatgcctgtaatcccagcactttggggagggcaaggtggaaggatctcttgaggccaggagttcaagaccagcctggacaacatagtgaagccccatctctatttattaaaaaaaagttttttaaaagataattttaaaaggtggttgattctgaaataagaatcacctgggaagctcttaaaagcctcaagcccgggcctgccccagccccgctgaatcagtgtctctgggccggggggcgaggccagtcattagttgccaaagttctccaggtgattccaactcaagcctctttgccctagagccgtggctcagcttgaggagcattagggcccctggaggttgttaaacccacgttgtggggccccagcccccagttcctgatgcagctgttggggtgagctgaaaatctgctgcagagcctgcatttcagggttcccaggtggcgccaccagcttgagggggtcttggcgctattgtaacgataacagcagcggtctccagaaccttctgtaggcctctgcatgctcacaggttagaccactgagaccacccatggattttatgtagtagacacacagggtgggcctcgtgcccagtgttgtctaacatgctttgtaagtgcagacccgttcctcccagtgcctttggaggtggagattgtggtccttgttttacaggcagggacagtgaagggactgtgaccgctgttggtgccaggcatctggctgcagctcccaggctctcatccctttgctgtgctcctttgcagcttggagggaatgattttttatccccatcttacagtatggggaaggtgaggctcagagaagtcaaggacttctgtctggggtcacgtggctaggaagctaacagccaggatccgagctcagatttgcccgacttccacccatgccggtgggcgggttttctccttggagaggggccagtcctgccccgaggtgccatctctgcacaggtaacagcatcagccaggcaccctgcaggccaccccgcccctcgcaggggtttccactaaccctgctgtctgccaggccagcctgtgggccccaccacctcctgggtgagcgttcccaacatcagagctatgcagcaggcagtgaggggatcatgggtctggcaggggcaggactgggagggacacccttatgtgctgtgtcctgttcctgcctcccctgttcacgccccacagaggagggaggaagctggggttaagggcaagggacagttcctgctctcccaggccccacaaggcatgcaagaggctaaaaatcagaagccagcaggacgcccaggtctcctgagcctgtgcgtctgatctgctcacctgggagacgatggtgctggcatgggcgggtcagaaggagcagcaggacccttccacggcccaggacaagccagccctcaggggccagagcccccatgctgggcacagggctgccaccttgggcggtgccctccctagctgccgcacttcagagtgagcccccatccctggcgtctgccctcctgagtgagtgagggaggggccgggtggggccggatcgtgatcagagccggagctggccttcgtgagtgatggccttgcctgctctgttgcccggtgacagtaaagaatattcctacagagtgtgggttttggaagcagacatgcctgtaggggtcctggctcagacgcttacctgacgttagcacctgggcaagtggcttaacctcatcactcggtgttggcatctgtaaaatgggcacaataacatgctaatgtctccctcgcggggctgtgcgagaatcgattcagtggcccgtggaaacccctagcgtggcccggatgtgtggtgagtggccttggaggcgtcagccttcatgggaggtgggagagctttgccgtcctgggtgaggtcggggtaagagaaagcagagtcggtccccagcaggtgtggctgggaggatgctcagtcactcccaatgttcattgggagtcactgtgctcccagtggacagagtgtcaggtagggtctacagatgagccccacttcttagccttgccctgggtccacaaatcagccagagttactgggtgtggggcttcctcaatgtcagggatgggggtgaacagaagggctgggtccggagtctccaaggctccttccaggctccagggctaacgctgtggggggggcccaggtctccacctcttgttgctgtgtggccttgggcaagtgactcacttctctgagcctctgtgtgtcatggggaagtgactccatgcctgctgctgtctcggtatttcacaagtgctcagcaaatgccagcagaccgtgtccttcagacgcggcagctggggttcctgactgctgggctactgctgcggtggctcatgaaggtttttctgtccccactacaaaacaaaaggcagctgatgcaggagttttagtaaagataatgtatattttagtaaagataacgtatatttgatttaaaagaatgctctttattctgagatttggtccatcccatctttgtgggtttttttttttttaatttggatgtgaaaaagacattccctttatttgtaattgcccaaagtcggaagcagcgaagatgccattaaatagggaagtggataagcaaacagcggtgacgacgcggagcagccttcaatgcctggtgctcagcgggataagcccgtgtgaagaggccacatcccgtggggttccaactagatggcgttctggaagaggtggaactctggagacagtgacaagatcattggttgcccagggttgggggggagggagggacagacaggcggagcccgggggatttgtagggcagtcatactactctgagatactctaatggcgagtatatgtccggatgcctttgtgcacacccatggaaggcgtggaccctgatgaaaaccatggctctggttaataatgtatctgtcttggcccatcaattgcgacagatgtaccacaagatgctaatatcaggggaagtggggggcgaggggatacagtatatgggaactctctgtactttccacttatttttctctaaagctaaaactgctctaaagtattttttaaaaagaaaaagttaaaaaaagaccacatgaacccatgtggagagtggaagaagcaaagtcaaaacattgcccagagtccatgctggaagccagttggggcgtggctgctccactcagttgactgtctgagtcttgtccccacagcacagattggtggaccttcagcccccacactggaggcactggccttccgaatcccttctcacctgagtggggtcaagacgcacctgggtcctatttgctgcccacctctggggccagctgctgttcttggcacctcccaccctagggggatggtgtctgcaaacggtgcttttggcctctggcatgtccaccctgccacaatcatcttcctcaccctcatctgcagaccttctgacaccacctctgctgacccctctccccttgtccttctggggagatcacgaacctgccccttcctggcattccccagccagtcctccctggggagcaggactgtgcatcgaggccaggctcaggtcttcacccacacccacgttgacaacgtacgagtcccctctgagccttagtttctgtggctggaaaaatgaggttaatatcactattgtgagaatcttctcataaacgcatctttccttcccctcctccttaaaatttttaatccttattgagctattatgtgcccatagtttaaggtgacatttggtgctaaaaacaaaatagagcttggagcaaaaatcatgtgtgtcttcagagactgaccaccatgtttttaagtgggtgtgtttgccgcttcctgagctcatggtcacttttagccattatctgttgactcctactgtagtagatggagattttcaatcccttagacccccattctccccactcccagctatctcaatattgctatattgcattttttgttgttaaatccatactcagtgtttttcattatgactatgtaagtattgcttactgctgagccaggcaatggagtctgattctgtacacttctcatgcataacttgagttagtaattgtctcgctttttttcagttgcaattttctttaaatcactggttcttttttcaccttccaactgctcagtgaaacacctctcaaatgcagcttgcacttgagcaaacctgccagattcagtaatacacacaaatgtacaaatacgtttgtttattgattgattgccttcttcccaattcttcccccattttcctgggtatttccttcacttctcctgtgtttgatcttctcatgtcttctttcatggtttcctccctcatttgggtggagcacatcctggagtagcttcctaagaaaggatgcatggaagatatagtttctgtggcttgattatttgataaattggtatgcatagtatgctaggttgaaaatcatttctgctcataatttggggcggtgggggtgcagtttcccactgacttctaggttcagtgttgctcttgagaagcccatgctgttctgattctcagtccttcatttgtgatctgtttttatgtttctctggaagcatttagggtctttgtcatttgagttctgaatttcatgccactgtatcttggttgggtgtctctcccctcattgtgtggtatctgtgagccctccagtctggacgctcacacccttccattccaggagactttcctgtttaaatctttgcccattttccttccctgctttctagaactcctgctgtttagagttcgggtgttctggatgagtcctttaattttcttactgttttgcctacctacctctttttttgatctagtttctgaaagattttcttgatttttatcttccagcttatttaccaaaatatttcttttagctattatacttttaatttccagaagctctttatccctggtctttcctttttaattgcattttattctcattttgtattttatctctgaggatttaaattctggtccctcgatgtcttctcccacctgctgcattttctgattccccctcttttttcccacttatttgtaagttttggtcttttttgtccctgccaaggcttctccttgtgtctgaggaccgttgactgttcatatattaaagtgaggtacgaaaaagctgagtggaaacttgtgtgtgtggcagccttcgcttctggctacagtctgttttttcagaggaattttccacctctctcctggataaagtaatcctccctgtttgggtggggtagcaagcagggtttttggttcagaatgagcactttcccagtgcctgctgaagcattggcgaaaagacgaaaaaaagagcacttccctggcagtcctcccccaccctcctctgcctggtgggcttgtctgattgttggcctagaaacttttcttcctgggttctgcagaaggagagaaaactctcttcctttcattcattatttatatttctcagcaatctggctttttatcctttttcttggtttgtcctaactttaagagatggagtcttgctctgccacccaggctggagtgcagtggcacgatcaccgcagcctcaatctcctgggctccagcccctcctgggctgaagcagctggactacaggtgtgcaccactaaacacactaatttcaacaaaattttggctgggtgcagcgactcacgcctctaatcccagcactttgggaggccaagacgggtggatcacttgaggtcaggaattcgacaccagcctagccaacatggtgaaactttgtctctattaaaaacacaaaaattagccgggcatggaggtgtgcacttgtaatcccagctactccagaggctgaaacagcagaattgcttgaacctgggaggtggaagttgcagtgagctgagatcatgccactgcactccagcctgcacgacagagctggactctgtctcaaaaaaaaaaaaaaaattttggtagagacagggtcttgctgtgttgcccaggctggtctggaactctggggctcaagcagtccttctgcctcagcctcccaaagggctgggattataggtgtgagcctccacgcttctcctgtccttttacttcattatttatatagttaatcacctcgctagagactgagaattctgtgtcctcaggctgccatcacaaaataccacagacagcatggcttaaaccacagtttatttccttgcagttctaaggctggaaggtcagggtcaaggtgctgggagagttgattgttctttgttttcgtgggcttgtccctctgtatgcctctgagtcccttcatagaaagacaccaggcctattggatgaggacccccagtgccttcatttttaactcagccacctctttaaagaccttatctatctccaaacaaggtgacattctaaggtggtagaggatgccgggggtgggggtgggtaggactgcagcatatgcattttggagaaacgcaattaagcccatagtgaattccggcagacataactattcagaactccactaagattaaccaaaaaaaaaaatttatatatatatatattaaatgatgggcggggcgcggtggctcacacctgtaattccagtgctttgggaggccgaggcaggcggagtacctgagggcagtttgagaccagcctggccaacatggtgaaaccctgtctctagtaaaaatacaaagattagctgggtgtggtggcgggcgcctgtagtaccagctactcgggagtctgaggcaggagaatcgcttaaacctgggaggcggaggttgcagggagccaagatcacacactgcactccagcctgggcgacagaatgagactccattgcgaaaaataaaaaaaatctggtgttggtagtaacgatgtaggggacatggtctctcttatagtcttttctgagggtaatttctgaaaaaccataaccccaaacccttgcttttgaccaagcaatttcattctaggaatttatcctaaggataaattttaatgtcatatgaagattagctgtgaaaacggaggagcgacccgaataccttgcggcataggattagcttgtaatttatgtgcttgtgaaacggccgtgcaatgaatggggctccgtgcagccggggacaaagtgggtgcagagaggcaggagggacaggcacggggcatgggggccacccgtggagaaagccctggagctttgtgaatgccgtctgttggccagcgcagggctctcactgtcacgttggacctgtgcccagggtctggtccctgatctgtgagggtcccagagggggcacaacaggcgaagaccccaaagacaggggtctgttccggggcatcctgggcagagagtgggtataggggacagaaacccagccaaagcggctcaagtggaagatgggtgctggtcgatatgggccagcctgaggggtgtcagagccgggaatggggaggccatcggaagcccacaggagccacttctgagttccctcagggtggaggcctggccgccttcccagtggtgcctgtttcttcctttctctgcgggttggcttctctgcgtccctgcctccaggtgggaaggggtccctgcaggcttcgtctcctcccagccgcagagccaccaccttgggctcccctgccccaggcccaggctggtggatctaattgggatttggtaagctgtgacgggaggggggctctggcccgtgcccacccatgggaaacgggccctataggaggcaggtgaggcgggccagagtgaatcagtggtccagtccagaacggaggctgtgacccgccagggtgggagaggacgggctttggggttgggcctcagccccgagtgggcaggcacagcatgggactggctgagagacgctctgtgtgggcttcggatcagctcagcgtaggtttcagtcccgctctagctgggtgacactggggttattttacctgtctctgcctcagtttccttctttaagtggacacagtaagagtgctgagctcccggggtagtgtgtggatgaaaggtgacctccgcctgcatggagccatggaaatgtttccccttttccctccactggactctgggacagtagtgggagcctgggtgggggcttttgcctgccagaactcatgggtcggggccgcacatgagtgagtgtctcctgggcagggctgtggccatgagctcaggtctttagtgggctccttgctcctcccagcaaagcgttcaccttgccccaccctgggacctctcaggtgctctttggaggtgttgacctggggcatctgtccatggccctgaggaggtggagcacctggtgagggctgcgctctctccagctgggaccccgggctccgaaactaaagttttgggaagagtgtcagctgacgggtggggcttcagaggaggaaaagaaacaagggtgtgagatgtgcaggccctggtgagagacaggcagcagcaagagcctgccagccatacttacccacaaggccggctgaggggctgtgctggcccagggctctggctttcggacccagacaatgctgctgaccaagcaggccaggcgctgagtgactgtcccagcggatctccgagcagggtcccttgagcattaggaatgcagcttctcaggccatgccagcctggcagaacaggaagggaggggtacagccctgtggggacgcagctgtggctcgagtgacacctgctggcggcctcatctcatccgctctctgcgagtctgtggtggttctagtcggcgtttcacgggcaaggtttagggggtttgttcctcagctggggtccacccacgtcttccgacttcctctctcagtgtttgggccatcggtgggtgaggtggctgcagcagagccgggggctcctgtgtgcggaggcagcaccgacatccactgcagccacaccctcctgagagggtctggaaggaagcagggcaccctgcgaacccaccttcctctggggtgtcttccggggccccagggccagggcaactggagcagacaggacattatctagctctgggggccgtgctgaccgagccagaccctcgcggcggcccacagagatgggcagcttgcggggcagctttgtccccccgacactgggtcctgtcttcatgcacacaagccgcctgttctgcaggtgaccagttaggttcgatgggacaggctttgggaatcagcggcttgggtttgccccccacagccttggatcttgaccttgggagaggcctccaccacgtgccctggggtggggtgggggcgggggcgtcctgcatctgcgccgttcagctcagttgccctcagccgcggttggccgccaagcactagggtgttgctggcacagccaaggaactgagcccagactttttgtttacttaatcaagcataaatgcaaagggctgggggtggccgagctgatggtgcaggcgtgtgcgctcaatagctccgtcacagtggctgtcgctttattgagcaaccgagggagcgagggagaggagcaactgcggcgagcgtggaggcccagcccgcagagctcccgtctgggggaagccctgtccctcactgcctgttcccggcgctttggtgccctctgctgtggggtgatgaggtcaggctacgcaggcagtcacggcagaactgaaggccgtgtgctttcgtgtagccaaaccccttttcttactgatatcagttataaaatcagagctatgttcccaccaggggcaaaaatccaacaccgtgcagttgcaaacacggggcaggaaagactccggcgaccctcattacactgtgccgggaggcatggccagagctccgtcagttcatgcgtcgcttaaacctagaggtgggtgcgattgtcaccctatcttacaggtgtggaaactaactcagctccgagatgtgactgaccttccccggccatagtacgcgcagcgcagtggggcctggacgcggctgcctggtttcaggtccacacgctccccagcactgccggccaggctccagcatgacgggggtcaggcctccacaaggccctgtcggccacgggagtttgctgcgagatcctgggtccctgactgtgttctcaaagcccctaggatttgaccagccgttcttttatcttaggagtcggaaatcttacatctgtatttttatttcgctgtgcttccgccccctgctctgctaccctcacctcactacgttgttttattggcatagtataaaattcacattttacaatatgcaattcagtggcactagcacattcacggggttctgatcatcagctctatcaggttgcaggccactttcatcaccccaaaaccccagccctgtgagcagccattcctgctcctccccggccatcatccgtctgtctctggatttacctgttcatgttatgggggagagagagagagagagagagtgtgtgtgtttgtgtgtgtgtgtgtgtgtgttttaaatgaaggcttgtggtacggggtctgttctcattttgcgccggtgttgggcctgaagtgtgtcctgtgtgcatgtctctgacccccggagtcatgggacccagtcacgtgctgcgctgacgtggagtccgaagttgtaaagacaaagctgggtgagaccctagtgactcacaggcccttctgctctcctttccagatctgggactttctcggggacaaccctgggataacagccaccactggagtctatgcttgaaggccattccgcctcgtggtgccctgggcgaatgtcgagggaaagcagactccctgtgcccccggggttggcttcttgctcaaggattccagatgctggcctcctgggtggtgttcccatgccgagctccagttgggggtgtgaccagcaccccgtgcgggggctgctggtgttctgtgttgtcagagcagtgctgttttgtgtttttctttaaaaaaaaaatttttttttgagatggggtttcactcttgttgcccagactggagtgcagtggcacaatcttggctcactgcagcagcctctgcctcctgggttcaagcaattctcctgcctctgcctccccagtagctgggactacaggtgcccgccaccatgccctgctaatttttatagttttagtgaagatgaggtttcaccatattggccaggctggtctcgaactcctgacctcaggtgatctacctgcctggcctcccaaagtgctgagattataggcatgagccaccacacccggcctccttttaaaattttaatttttaatgagatggggtctcactatgttgcccaggctggctttgaactcctggcctcaaatgattctcctgtctcagctgtgttttgtgtttgctccagccctttgctggtgaacagacacgttcactggacacctaagtgcctggaccgtggagcacagggtgggggtgctgttcatggccggaacgccagaggctactggggagacacaggagcgaccaccatgatccacagaccaggactgtacagagcacttgaaggggcggcctcaagaattgtgccggaacagtgaacatgagggctcctggctcccctctgaggacaagggttaggtaggaggggacaggggcagggctgaggtgggtcggcttggttcatggcagggcttggggagtgaggagagtgaggagtaccgggacccggggtccctgctctgctcacctgctgagaatgagccagtgttggcctctggtctccatgtctgtagagaggcttctctgcttcccctcctgtagaatgggaacgacaacatccagccatagagtgctgagaattcagggacaggacacagcgaaggtgccccagtcccccttcctgaccccagcctggcgtcaccctctatccaagggaagaagcagggatctgcctacgaatctctcaggatgtgaagtgtggcccccagcctggtgcctttgcagtgggcccaggacggagggtagccttggcacctggggaggacaggtgaacctggatccagactctgcctcaggtgacagccctgggttctaacgctgccgcttccgcttcctggctgtgtgttcctagggcggccacagcccctctccagcctcagttgcctcacctgggaagagaggtgcagggcttttgcgatgatcataatagttaccatcaatcgagcattagcgactttccagcaccttaaggcagttaccctgtgatctgcacagccgccctcccctcgttgcagatgaggagactgagtcagagagaggttaacccagacattcccaaggttgtagattgagaaagtgttgagttgggattcgaactcaagtctgtctgaggcctcctagccccttcctgaccccagagccttccgcacctcatggctccaccagaccctgcatgaagctcctggtgggcaaactgggcaccttcactttaaacgttgagggaaaaatacacataacctacagtgtcccgtctcagtcatcttcacgtgtgccgttctgtggcattaagcacattcacgctgttcaaccgtcaccagaacttttccatctccagaactttctcatcttcccaaaccgaaactctgtcccactaaatgctcactgcctgtcctccctcctgtcctccctcctggcctccctcctggcctcccgcctgtcctcccgcctgtcctccctcctgtcctccctcctggcccctcgcaccctccgttctactttctgtgtctatgagtctgatgactccagggaccccaggagagtagaatcccacaggatttgtcccttccagcctggcttattccactgcatgacggcctcaaggctcatccaggaagcagcaggtgcccggctttccttcctttttaaggctgaggaatattccactgcatggggggaccacgtcattttatccccgatgccttcacttttcagctcttgttcccatctgtatctgtaagctggagcatcccttgatggaggagggatctcagggagtgggtgagcctctcctctttccagggtcatcctccactttgcgggggcagcccaccttcctggagttccagctgagggggggcccaatttaacaagcactttgggaggttgaggtgggcggatcatgaggtccagagattgagaccatcctggccaacatggtgaaaccctgtctctactaaaaacagaaaaaaattagctgggtgtggtggtgcatgcctgtagtcccagctactcaggaggctgaggcaggagaatcgattgaacctgggaggcaaaggttacagtgagctgagatcgcgctactgcactctagcctggcgacagagcaagactccatctcaaaaaaaaaagggttgtccggttacctgtgcatgccaggtaatcgacaaatgctttttatttttatttatgtatttgtttagagacagagtcttgctctgtcgcccaggctggagtgcagtggcatgatctgtgctcactgtaacctccacctcccaggttcaagtgatcctcctgcctcagcctcttgagtacctgggattacaggcacccatcaccatgcctagctagtttttttgtatttttagtagagacaggatttcactatgttggccagcgtggtctctaactcctgacttcaggtgatctgctcgcctcggcctcccaaagtgctgggattacaagcatgagccaccccacccagccaacaaacgctttttaaatataagtatgtcccatgcagcgtgtcccctaaagaacgatgtgttgttcatctgaaactcagatgttaccaggcgtcctgtgtttgatgtgacaaccctgtccacagccctggcacggaaggggcagtcgctgagggtgcagtcttggggtgagggtccctgtgatggcagcctgtgtccagcttggactggccatgggaaggccactgtgtgggcgggtctggccttggtaaagggccaccccctgagacccaccgagcctagttccagtttcctcctcacaaccccagcctggaagggcgttcgggtgtggagcaagccacagggtttccccccagtgtggttcgcattggggtgccgggtggttccgagtcagctgccccctctgcctcctccccgtgcccatcacaactgcccccagtgctgggacctctgggcaagaggctgaggctgacactctggaaaggtgtgcagtggtgttgtggggtccctggggtccggtccacatacatccctgcttgcccggctcttggcatcctgtaggagaaggtgccacagcctagtgggtgggagggcaggagccccatcactggagtcggaggttgcttttgatgttgatggcagtgaggttgcttctgatgttgatggcagtgaggttgtttccgacgttgatggcagtggacttgcctccaggttagctgcctccccaagcagctttgggggtacagaatgaccgaccagtgtgggatcccaaacatcctatccccttgcctgaaagtgggacgaggctgaagctgacctctcgctgagaccacctcattcggccccgtcctctgctgccacgtccttcttcctggtaccccccttctccagccccaaataagtcacgttcacaggatccccagctcaggctctgctcctggagaagctgccctcagaggctgcgttgccgattcctttttcaacggagaggctgcagcgtgtggcaggtgccaccatctcttggagtgaggcagcctcaggggctctgtccggggctgcagcctgattggtgatctttgcacgccccttctctgccctggctgggccatatgccacatggggcgtgaggggcctgcaacacaagtccctctgggggctcgtgatgtggttgagctggaagatacattctggaacatctaagaccccagccactgtcctgagtctggatgccgcgggtgccgggcatgggggctctgggcccgggccctggggtgcttggaggtgctgtggaggaggggtggggctggcttggagcccatgggattcgattggagggtgggagtgtgagagaggagagagcgtgaacagagccttggacagaaaagcctggaaggatcaggaccctttggggggtggcgggtgaaggtggcggggtgtggggataccctggggacggacaggtcacttgaggctacaggactttgaattccacacttagtttggatcccaccctctggtgtggggcgtgtgagtggagggggcctggctagggaaagggggggggcagtggggagtggagggctgcttcgctccgagagatggcggcacctgccacccgctgcagcctctccgtttaaaaagtgactggcagaacaggagcagctgctgccagctcctgtccattttgtcctctgaaaagagaggtcggggtggccaggtcctcatttttcaggagacagaagagagctgaatttttatgtcaaatctcttggttttgagttgttagcaggtaattccaatgttttatgaaaacagcggtgggacgaataaaacctacgtatcagtaagtctcggcctccaggcctctggtctgcagcctgtgccaccgtgagttggaagagtggtggacggactctgttctccccgcaaaagccctttccagggtggcacatccacgccgttagtgcccggctgcagggagaagctcaaatgacaaatgaggcttgaggtttgccgcgttgggcgtcgtgctgaggcccagccgtcctcacggtgacctttggcatgaggagtcctggttccactctacagacgaggacactgagggccagcggggcccagaaacttccctgagtcacagctcacagagcaagacatgggcccaggtctgctgaccgggtttcctttttattttattgtggtaagagaaatacagaatgtaccacgttagctacttttaagtatacaattcagtggtattaattaccttcacggtgttaggtagctgtcatcactgtttacctccaaggctttcccatcatcctactgcaaaactctgtccctattcaacactgaccccacaaccctccccagcccctgcacccaccgcgctttctgcatctctgagcgtgactactctaaggaccccgtgtacatggaatcatccgatatgtggccttttgtgcccagctcagttcactctgtgtaatgtcttcagcgttcatccacattgcagcctgtgtgagaatgttctaccttttcaaggctgaatgatgttccatcgtatggacggaccgcatggcgtctgtccatttaccaggtgatggacttgtgggttgcctttccctttccagccatggaaacagtgctgctgagaacccaggtgcacaggcagctgctgcagtccccaccctcccttcttctggggatatcaggtctgctgattttatgtctgaaggtcatgggccactgtcccttccctatgcccttgaatctcttccatggtgtgtccactgtgtggtcttcctggatacctccagcaatggggagctcactgtctcccagagcagcccattcagggcttagtgtgtagcccacacctgtgtccctgtagctgccactcattagcctcctaacccaggacgcgtttccttgtgcccttggcaggggctccgtattcactctgggttctgtggtcctcactctgcaccacagactctgatgcctcccttctccctccccgatttccaagagagaacaagatctagccatgagaagcaggatggaggtgtcttcaaaaacagccactggtgatagaagttgtaggaaggtaccatggtctgtctgcctccacgcaaacctcaccaggtttcatcaagatagcacaccaggagtggtgtggctcatgactgtaatcacagcacttctggaggctgaggcaggatcacttgagcccatgagttagaaaccagcctggccaacataatgagactgccatctctacaaataatttacaaagtagtggagcatggtggtgcacgcctgtagtcccagctgcgcaggaggctgaggcaggaggatcgcctgagcccaggggttcctggctgtcgtgagctgtgatggtctcactgcactccagcctgggcaacacagcgagaacctgtctcaaaaaacacaaaacaacaggaagctcagacaggactgtggctgcttcaaccctgtccgtggccaggctgtgccccctcctctgtcgctgggcactcacccctctctcattttctccccagggacctaccagggccagtgggtcggtggcatgcgccagggctacggcgtccggcagagcgtcccgtatggcatggccgcggtcatccgctcacccctgaggacgtccatcaactccctgcgcagcgagcacaccaacggcacggcgctgcatcccgacgcctctccggcggtggccggcagcccggccgtgtcccgcgggggcttcgtgctcgtggcccacagtgactccgagatcctcaagagcaagaagaaggggctgtttcggcgctcgctgctgagtgggctgaagctgcgcaagtcggagtccaagagcagcctggccagccaacgcagcaagcagagctcctttcgcagcgaggcgggcatgagcaccgtcagctccacggccagcgacatccactccaccatcagcctgggcgaggctgaggccgagctggcggtcatcgaggacgacatcgacgccaccaccaccgagacctacgtgggcgagtggaagaacgacaaacgctccggcttcggcgtgagccagcgctcggacgggctcaagtacgagggcgagtgggccagcaaccggcgccatggctacggctgcatgaccttcccggacggcaccaaggaggagggcaagtacaagcagaacatcctcgtcggcggcaagcgcaagaacctcatccccctgcgggccagcaagatccgcgagaaggtggaccgcgccgttgaggccgctgagcgggccgccaccatcgccaagcagaaggctgagatcgcggcttccaggtaggagggcgagggggcggggggcccttcttggtgcccagaaggtgtttgtgagcccagtctgttcagtcctgctgtcgctcaaggccttgggctaggcccagtttgaggcctacactggtgtttctcaaactatgcccccatggaaccctagggttccctggaggttctcagaggtgactgtggtcaggattggtgcagaggaatggttgatttgtgggggtgtagaggcctacagcctccttaaactgagcagtgtctctttgttctatatgctgatgtttagtgtaaaatattggtgaataaagaaggtggtctgttccgttagtacaatgcattggagtgctgctgtgctagctagtaggggtgacaccaccaggtgggggtggcaggtccagcactgcagggctgtgggaggtggctaggagctgcctcagctacccagacctgcgatctagattcttccgggaccctgggagatggcagcagttgggaggccaattccgagtgcctggcaaggggctcatgcaggcctggtgctttgggggcagccgctgttctgaatcggctgcatgacttacggaatttggggtccagtggggcctctaggccctaaggaatgggtccagaggtgactgtgggtgggatcgacgtggcttttgggtacctttaggggtgggtgcaggatggggcctttagggctggaggaaggtgcccagggtctggctcctgtggaggtgagtgtgtgagccaggggctggtccccgccaagctgtggctggcaggagccacctgctgcaggttggaggaagttcccctgtggaaagccacgggccccacaggtaggcatttgggttctaaagtaactgaggttactaaagggctttgtcaagacttgggaaggcatttcagaaaacccagagcctttgctttccaccggcatttgctttcctgggccagacgagggcccttggggtagcccggagagtcttggggcagggatctgggagctgcgggggagtccatgggctgcccaggcaggaggcttcccagggcacgttcccctgcgtctttctggatggctttgtgttctcagccaggggcagacctggagttcctccaggaaagctcccagcctgggtgcggctcagcccttcccgacctgtcgctaattaaagttcagcccatttggttctgattttcagtgacctttgatctatagtgaaaaacaaaaatggtggctgcggtttgttggcagaatatgttgctcgcgacttctattgttttagagggaatcaagatcgattccaagaagctgaaagaaacatggaattactacctgacaccgaggtccaaactcgctgtttgcccctccctgctccctcagaaatgttcaggcagggaaataaacagcagcccacgtgtgactactcatctggggttttaagaacaaattagaatcagtagttattttttccatcataaatgtaatacttgttccacaggaaaataaataacactgagaagggagaaagcagcattagctctggtctgatggatcggccgagcgctctccttggcattttggtgaatttctttcctctgtgttttgtttttcgaccctttctattttgtatagttgcttttttgaccctagtggacaagaagcagttttgggggctgggggacagcggcgtcacggaattgaggaagctcgtggcagcttccgtgtgacctgcagattggttcatgagttcattggttcatgagttctcagcagctcgaggacttagtggacagtgccctgcaggactgagcttatttcacagccttggcactgggtggatgtctgtaggactggggggacctgcgacctgagatagttttcagacgaattcccctagacattaagagaagcgggttcccattaaggagcccaggtggcatggacagggctgggggcagcacaggtgaggagctgctccaaggcaggttgtcagcctctctggacctcaacttctaatctctgaaggcctgtgaagcttaggtggtaacagctcccttcctggggcatccaacctcttcctggggttttggggggcccaggggctctgtggagcattgctgggggagatgcctacgtataagtgggcatcatgctggggtgaaagcccaggggctgggccgggagggcgagacctgagacccatgcaaaggagccggggccagggtggggtgggcacggctcctactgagtccccagcccttgggacgctggccagccagccttggcatggccagcatccctgtgtctcctggggaggcattttacttaatggacagaaggacagacagacgggtggagggagtgagagggaaaggatgggtttgcaggctggtgcagctgtgaaactgacggagcccaccccctgccaaccccccgacagcctttgaggcccagcagcccatgctccctggcaggttgcggcttgccttctgcactggcggagtccgagctgactccgtcccttcgcccgagcgggcgtcgcggggagggaggtggttcctgcttccgcatgcgcacaactggggtcttggatcgtagctcctttgtgagaaagggactggctcacccgccatgtcctgctgtccacacacacggctctgcacaccactcacggcctcctcaccgctgtgcacagccagcacgtccatgcgcacctgtggagccagggtgtacggctgcacaggtgcgcctaggtggaggtctccaggtcactggaacttaaagtgtccaagagaggaggtgtcaggcctcaaaggggcactaggaactggcgtctcacccttgcctctgagacccgcagacccacatccagcctgggctgtcgtggctgagtgccccaggccggtcgcctcccctctctgggctgggttccctgctgaaggggggcggggctccctgctccctgtagtggcctcggcgtggggccgggcctgtggttgcaccatctccattggtgtcatcctcccccagccctgctgtgacaggcatgggaggcaggtgtgtttgtgagctcactggtgcgacccttggaggtgggaggctacacagtatttttggtcatcagaggatggaggatgagcctgcattctgggctgcagggcctggagctgtgctttctcaatggacttagaatttggggaaaaaaaaaaggaaaaaaaggagggaagagagtctgccgccctggagagtgaagctgatgaatggctggctcaggcgcccacagccccagggccaaccctccactggagcatgagagcggccgcaccacgtgggctgaggagtgactggccccgggcgggctcctgccactatcacagtcgagagatgcgagggagttgtagggcagctggcactgtcctcacccgccccggccggcagggcttgtcaggccgcgtgaagtgagaaacggtttgcggtgtcctccgcggagtgccgggcccttccccggagagcagctctgcagggaagggaagtgggttttcctggaaaacggggcgggaggtgtggagctcggagagactgaggtcctgcactgctaaggggactggccccggccctgggctgggagagggggagctgggactcagcccagggtggagtcaccatgggttctaaggcacaggatggataccctcctcggccatgtgacatcattgtttgggatgcgcccagtgttcggagccttcgaggctctccaggtgcctggagggcttgtagaaatggtggtcaggccccacgccccagactttgtctcatcatgtctaggtgggggccccagcacctgcatgctgacctggtccccaggacgcagatgctgctggcctgagcgtccccggctgtctcctgtctggtgtgggtgctgccgccgggaggccttggccccacggggagatgaggcatcacacacgcagccacaacacgggtcggaggcagagtccagcccagcaagggtgtggcagtggagacgagggaggggtgaagctggtggttccaggaggttccgtctgggtgagaccctctgctgcagagaggggcgggagccagtggccccgcggagctgaggtcatgtgagaaggggctgcagtctcttctgtgtcattctcctgtggggtcagcctcaccccagtgggaactcccactagtgaaagtctgagatggccccatcctgccgtgtcgcctagcagtgcaccacagggcattcggcccctcctgccttcacacactcaagacgttttcatgactcatctcctgccaggagggcacacacagggcacctttgcacggcgctgcctgtcctgaatgcctcgctgtccccgggtggacataggaattcatcacagtcctcctcgaagcccgggttgctctagaagatgaaactcaattgctgtccttgatctgctgctcactagaggccctgggttgggaatcggaatgtaaatgtgtcacccatcctagagaagaaagtcctgcagtgtgacatggcttcattttcaacagctgagaccctctgccacaacaactctcacagccccctcatccccacccgccgtggaaaccaaataaaagcagaaagctctggtggaagccgagctgggggcgatggggcagattgtagcccgtttctccttcccgtccccctccccactttggcccctgggacctgctcagaaccccagggtgaaggagacatctcaagtgtgacccattggctgcttctgctgcgggagagggagagacggggtggcccatgtgaaagctatgcctcctgcagccccgcaaagcctgcaaaagctcagccaggatttgatgggattgtttctgctgggaccccctctctgctgcgtctcgtgcaaacgttgctgtgaagggatgccaaggggttttgcaaagcagaaacccaagctgagaggaggagaagggattgttctgggggcaggcccaccttgattcagggggtttcgcttcattgtgctttgcagacgctgtgtttttacacattggaggtttgtggcacccgtgcatggggcaagcctcttggtgccgttttcccaacagcacgtgctcacatcgtgtgtccgtgccacactttggtaattctcacggtatttcaagctttttcatgattatatctgttcatggtgatctgtgatcagtggtctttgaggttactagtgtggttattttgggatgccacacatcgcacccatataagacagtgaacttaataaatgctctgtgttctgaccaatcctccaaccagccgctcccccatccctctctctcctctggtctccctattccctgagacacaacagtattaaaattaggccagttaataacactccaatggtctctaagtgttcatgtgaaagaagagtctcacatctctcactttaaatcaaaagctggaaatgataaagcgtagagaggaaggtgtgtcaaaagccgagacaggcctcatgcaccaggcagcctagttttgaatgtaaaggaaaagtaattgaagaaaattaaagtgttactccagtgaatacatgaatgataagggagtgaaacaatgttattgctgatatggagaaaattttagggtctgaagagaagatcaaactaaccacaagcctgatccagagcaaggctcaactctaatgctgtgaaggctgagagaggtgaggaagctgcagaagagctggaaacgagcagaggctggttcatcaggtttaaggaaagaagccgcttccagaacataaagtgcaaggtgagggagcaggttacccagaagatctggctaagattgttgatgaaggtggctacactaaacagattttcagtgtcgatggaacagctttctattggaaggagattccatctaggactttcatgctaggaagaagctaatggctggatttgaaggacaggctgactctcttgttaggggccagcacagctggaaatgttaacttgaagccagtgttcattgaacattccaaaaatcctagggcccataagaattgtgtaaaatccactctgtgctctagaaatggaacaacaaagacctggatggctgcacggcttacagcatggtttccagaatagttttaagcccagtgttgtgatctactgctcagaaaaagattccttttaaaatattactactcaccccggagcgcccatggagatgtacaggaagatgaatgttgtttgcgtgcctgctaacataacatccagcatgcagctgtggatcaaggactaattttgactttgaggtcttattatttaagaaatacatttagtaaggctgccatagatagtgatttctctgatggatctgggcaaagtccattgaaaaccttctggaaaggattcaccattctagatcccattaagaacattcgtgattcaaggttggaggtcaaaacatccacattaacaagaatttagaagaagttgattccagccctcatggacggctttaggggctcaagacttcagtggaggaaggactgcagatgtggtggaaatagcaagagaactggaattagaagcggagcctgccgatgggactgcattgctgcaagctcacgaccacactcgaaagactgaggagttgctgcttaggggtgaaacgagaaaatggtttcttgcgatggaatctactcctggcgaagatgctgcagacattgttgaagtgacagcaaagatttagaatgttccttcaatttagttgataaaacagcagcagagtttgaggggattgactccagtttccaatgaagctctaccgtgagtcaaatgctatcaaatagcatcacatgctacagagaaatcttttgtgaaaggaagagttcattgatgcagccaacattgttgtcgttttttttttgttttgttttgagatggagtctcgctctgttgcccaggctggagtgcagtggcacgatcttggctcactgcaagctccgcctcccaggttcacgccattctcctgcctcagcctcccaagtagctgggactacaggcgcccaccaccgtgcccagctaatttttttgtatttttagtagagatggggtttcaccgtattagctaggatggtctcgatctcctgacctcgagatccgcccacctcggcctcccaaaatgctgggattacaggcgtgagccaccgcgcccagcctgttagaagttgccgcctcagccttcggcactcaccacgctgatcacccacagccaagccaagatcctccattgaaggctcagattattgttcacattttttagcaacaaagtattttaaaattaagatttgcaattttttaagatataatgctatagcacgcttaatagactacaatatagtagaaacataacttttttctttttcgtgacagggtcttactctgccgtccaggccggagcgcagtggtgccatcacgactcactgcaaccttcacgtcccgggctcaagtgatcctcctgcttccgccttccgagtagcgtgtggggagggtgcacgcagctgggctaggatggcctggctggggtcagcccccgtctgtcctggaggccaggcaggtgcggagcttacggaggtggccacctagatgatggtgcctactctcgtgagttgaggcccttggatctctggcagtcagcaggactgtggtggcagccggtgtgctggttgtcagctgatgtccctgtctgtgatttttccgtgtgaatgcagccttgactgggcatgtagatcagaggtgacaagtcctgggcacctctgccactcttcttcctgccctgcacccactacagacacagctaattggtggctgcgttgagaatcttgtcaccaggcaggctcttctgtcggctcaggactgtcctgcgggcatagcaggaagtgaactgcagggggaagttggggcctggttgctgaggagggcagtgcgtggtctccaagccagtcagtgcctgcgggggggactagaattctcacccaggcctctgctctcagtcctgttcctcctctcacattcttcacacccaggctgggctcagggatccttgttgatgatggccttgaaatgtcctctgaacagtgtggctctgggggtgtgtaaaacccagggtgatgcctgctctgaaaggggcttccagatccctttgtgtctccagcacctgccgtgtgcctgccccaagctggggtctgtgagctgtgccttggggcccctgcctgtccccgctctgctctctgctgtggcttgctggctgcagggttctccagtgagtgagggatccctgctggccatgcctggagctgagggtggagggaggcccagcaggaagccccacaggtaggccccagtgagggtgcattatctacaggaaagttgcctgggacactctagtgggccgtctaggaaatgcagcctttaaggacctgaaatggagggggatatttttagtttttaaaatttatttctcattaaaattataacacagcctcgtaaaaatattaaaacagcgagacagatgtgtcaggggttatgtatatgaaggaggtagcacagttctcatcacgggtgtgcttagtgtccccctaaagttcatgccagttaatgtgatcgtgactgtaattggaaatagggtcgttgcagatataattaagatgaggtccttctggagtcgagtgggactggtgtccttagaggagaagagacacggacacacagaatgccacgtgggacagaggcctgctgtctacacctgtgcagaggagacaacaaggagagtggggcatgacccctgcccacgacactcgcctccaggaaggcagccagctgcccatctttggtgcggtcatctctgcaggcaacagaatggcagagtggcagtctgatcactctactccattgtgtgagagtctccaggatgaagaccaggctccccagcaggacgtgcggccctcatggagttctggccttgttttcggctgttgcctggctgatattctgcacatctgcccaccgtcctctgggcggtccacgaatacattgtgccttcctctttgcatatgctggtccctctgctggcaatgcccttccttcttggtgagctccaatgcatccctcaagactcagttcagatgcgcctctctggactcatccccaactcccagacggggttggctgctcccttttttcagatcctgaaacacttacttgtccccctttatgtgggcatttatctgatagtagagtttttctgtactgttggaatggtgagttccctgaagctaggtcagcttccttctcagcattcagcaggcggtgggggaggagggaaggagaggaacttcctaataaagatgaacacctctttgtggttaggtcagaccagcctgtgcctgtgcgacctggtgcagaccttcacctctcagagcctcggtttcctcatctgagcctcaggcacgacaatctgctagactctgcttcccggtggcagctggggaatgggatgggaaggagccctgggatgctcaggtcatccctgccaccagaatgtccccagagtcatgaccatcagcacctcagcctcgctgctttttccttggggtctgcaggggcaggacgcaaaccccacacgctcgctgcgcagtaagctgcaggggcttctccagcagcacctctgaggcctgcctaccacgtggagatgctgctcccgtgggctctgaccaccgctctgccctcttctcacaggaaccagcgaccactcggcccggcgtaaccacgcatgtccactggtcacctggtggccttcgacaagaacgtgtgataaatccctgccggagtgcggctccgggaaaacgctgtcaccgcaaaccagctcctctttgttgcagtcccccgggggcatggcccggcaagtttccttagccaggggccagtttgcctggggtcagtgggcagcgcctgggagtcgagtgtctcgagtggggctctgcttggtttctccttgaaggtctggcagggtcagaccctgcatcggcagtaaccgcggagatgggagagccgagtctgccgctgtgggcttcctgggccttcccgccacccccgccagggcccttgggctgcatattcgaggcgcgcagcctgccaggccctccggcctccctgcgtggccaccagggaaaatggcttcactttgctgagcctctgtctccctggttacaaaacaaataattttattttttgtgacagggtgttattttttgtgacagggtgttgttctgctctgtcccccgggctggagtgcagtggtacgatcatagcccactgcagcctcgatctcctgagctcaaacgatcctcccacctcagcctcctgagtagctgggaccgcagccgtgcaccaccacgcccagctaacatttttatgtcttgtagagatggggtctcactgtgttgaccaggctggtctccaactcctggcctcaaaaattctcctgcctcagcctcccaaagtgctgggattacaggcgtgagccactatgcctggccaataatgttctattttaatttcctgtattccctaaatagtcataaccgtttccaagggcgatattcagaacacgtaatgagtgcagtgcaggcaccagcccacgtctcggccccccgtgtggggaaccagtctggccatctcatggtccctgcgtctgctctgcccacctcgtaggaggctctggattgaatgaggttcgacagtgctgactgtgagcctggccctgagtccgctcaggggtctcacttgccactctgctgctgtcactgcgccgttccctttgcccacatgccctcctggtctctgcatagatgtcctgagtgggactgctgggagtggggcactgctgcgtggcagtggagcctcgatagtgggtctcttgggggattattggcaagctgcaccccttgaaagttaaccgatcggggtgcatggcgtgaacttcccttcctgagctggtcagcccagtgtatgctgtgagccaggagccctgagggcgtctctgcccgcctatctcagagcacactctgtgttgcaggtgccgtgacacctattttacagcccaggaaacagagtctttcatgctgttccttccagccgaaccctcagctggagtcactccagaagccgcaggcaggagagttcccacaaaggactggatgcacaccttcctgagacggggggtgggttaggattccagcaaaggaagctctaaacaccagagtggccagtccatggcatttgttgggggacttacagagggggcttcagcttcctgtgggaatggggagatgagccacgttctgccccggtatgtctgcaacgacgggatcagattacggagttcatatgagggtgaaggaactcggctcagggccgggcccagtttccaggcttgatcttgcagtgtttgggggcaacaccctgaataaatgaatcagtcagtgcctgggaacattcgaggccctggcttgggttcaagcctgcaggaaaaacgtgcagctggcgggtcaggggcagttaggacagaggacgaggaggaacgggggcccctacgtgccatgggcatgtgctcgtctctctcctggtgtccgcctttctcctctgccttgtggctcagcttggactgccataacaaaatacgatagagtgggtggcagaaatgcattttctccccgttctgaaaactggacagtccaaatgcatggtgcctgtggtgttccgacaggggatcactcctcgggctccttctcgctctgttcacggggctttccttggtgcatggagaggatctccctctcctcctcttcttataaggtcaccagtcccatcagattagggccccacccatatggcctcatttaaccttaattacctccttaaaggccctatctccacatataggcccttgtcatagcggaggcttcacataggaacctgagggggactcagcctggagcacctggtgtgttaggaggaggccaggccagcgctgagcaccctgcctgtgggtgagccctgcttctcaagcaacagtaataaataaaaaggaggaggccaaactgaccagacctaaaaaaacagtatcttaaggtctgacacctgccacggcatgaatgagccagagaaagtgatgctgagtgaaggaagcctgtcacaaaaggacaaatgtggcatgtgaaatctctagaacagggagattcatggggacagggagtggactgggttaccaggggctggggtgggaacaacggggagtggcttcttcatgggtgtagggtttctgttgagggcgacgacagtaccctgcaagtggaccggtgaccgatgcacagcgttgaatgtactgaatgccactgaactgtgaactttaaaactgttaaagtggcaagttttatgttatattaaaaaaatcatatatagaaaggatgttgtattaaacgagaaaaactcatttctctcaagtaccagtcactcattgtggagactgctcttgaggtcactgtgcccaggcctcttctgtcttgagccagtccatctctggggtgtgaccctagcttacccccatgaccacaggaagaccatgagctggtcctttaaggatgcaacctgggagttgccccgaggactgtgctcacattctgttggccaaaactcggttacgtgaccacacctagctgcaagggaggctgggaaatgtagtccttagtctgggggcatgtgcctggctgacaatggggcttcagtgctgtgggagaggaggagctggtggctgccaggggatggacagctgtctctaccaacctggcctcacagtggtcacgctccaggacataaatgtcccctctgcagcaaagacttcctgggtgtggaggggactgggggcccacaccctggtcttcacaagatggtctcctaccccggaaggcaccatgcggcccacgcttcagtgtgaagacaccacctgtgtgttaatgggcccaacaccaacctgggtgcagggcaggtattcagcaaacagtgaatggacaccagggagctggctactatagcgacctcctgaggtcgcagggctaccaaacagtgcacggcatttgcaccccagctcaggcgtcccggcagggattctgcattgtctgcctttgaaaaaagggtgggagagttaggacaggaattttctctgtttccctctctctctccttctccccgcttctccccctctctttttccctttctcttttcctccctctctgtccctccctctcttttcctctctatctccctatctgctttgctctctgtctctctgtcctatttttctccatcactctttgtccttgtctctttttctcgttctctgtcactccgtttctgcttttgttcccccttctctctctctccccaacccccctgtttctctatctcttcacctgtgaattcctgaaacagacccagggcatgatgtcgtggagggcaggccccagaggcgtccaggtgacaccgtgtgggcatttgtaaagcaggaggccccagcaggtggagcaggaggactcacccccctgcagtgggtggtcaagaagagctgcctttcctaagcccctctctcctccagccacccctcacctggggcctgctgagagggacaaggtggattggggcttgctgtggggctggtgctgaggcaggggtgggtggccccccagcccctatttcctcctctccaaacccagccatcccagttaattatttgcccagcagggcagcttgactggctggtgtcttgctgagcaataagcagctgaataagggtgcaattgctggaggcggggtcgcagctgcagacctgggcggtcacttagtctgggacagctgcggcggccacagcgaaagccatgcagcctgccccatgcctggctttgtcgcgacggctgctggaacagacgggtgtggtggctcatgcttgtaatctcagccctttgggaggccaaagcaggcggatcacttgaggtcaggagttagagaccagcctggccaacatggcaagatcccctctctactgaaaatacaaaaaaattcagccgggtatggtggcaggcacctgtaatcccagctactcaggaagctgaggcatgagaatcacttgaacccaggaggcggaggttgcactgagccaagatcaagccactgcactccagcctgggtgacagagtaagactgtctcaaaaaaaaaaaagaaaaaaaaaaagaaaactacacacacatacacacaacataaaatgtatgattttggccaggcacagtggctcacgcctataatcccagcactgggaggttgaggtgggtgaatcacttgaggtcaggagttctggaccagtctgggccaacatggtgaaattccatctctactaaaaatacaaaaattagtagtgtattagtgggtgtggtgacaggtgcctgtaatcccagttactcaggaggttgaggcaggagaattgcttgaacgcaggagacgaaggttgcagtaagccgagatagcaccactgcactccagcctgggcaacaaagcaagactccatttcaaaaaaaaaaaggatgatttttaaccatttttaagtgtaccgtaagtggcattaagcatgtggtgcaaccatgaccaccatctatctccagaactcctttcaccttgcagaaatgacaccctggacccttgaaacactaactccccctcccaggttccctcccccagcctggggattaggcatctagcagctgctgtctggagagggatagcatggccctgctccgtcccttctgggcccgttgagctctgctgtgaaggggattcctttccttgtccctgtcactcctagtgtggaggtcgggggtaccaagccccagccctgccacctggaaaccctgggaaagcagcgtcacctccctgtgcctcagtttcctcatctgtaaaggggagctgaggacaggacctgcctccgagcctggggagagacggcagtgcacagggactagctgtgcgtctcagtaatacggagagaactttgcaggccaatggcgtccctctgagaaagactctccctggattctgtttcagagagttgagcttttccccagagcagatgctttgaaactgtctcaggtggacagagggggctgcagggagggcacagaggacttcctgggagtgaggtttcctgggattgagtcccagccctgctgtagggctggagtgaaaggggcctccccagagagcctctcccagggctctgtccccaagtggccaagctaattcggttccgtgctccccttttgcccacccccaccagaggccacaggctggactgggcgccactgctcatgcttctgtcctgggatagcacagaccagtacaccagggtctggcacatgtccgttgtagtcactgcagccctcccagtctccccgttttgtagaggaagccacagctcggggcaaagccgcacctcgcagtggacaggtgagtctctgcctccccaccagctgcctcttccacagatggacccccaatcacactgtcatatcgcctgtctgagcctcactgtgctagtctgtaggagggggcacctcctcttgggccatccatataaggctggagacaaacagctccacccagttatgggagtcccatgccatccaggacacatccaagtggatctctcatagcctatcatggttcctccaagactcagttttctcatctgtccagtggaatgacaatggtacaggctgtgagaatcccttatctgaaatgactgggatcagaagtgtttcggatcttggctttaagttgtagaatatttgtatgcacataatgagatatcgtgaggatgggacccaagtctaaacacgaaatttataatacataagtttctggaggctccagggagaatgtgttccttgcctttcccagcttccagaggccgcctgcgttccttggctcgaggtccctcctccaccttcagagccagcggggcagcctctcctctcctctccgacctcctgcctccctcttacaaggacccttgtggttcggggtcatctgattatccacccagataatccagggtcatctctctctttcctgatccttaactcagtcatatctgcaaagtcccttttgccacataaggggacacattcacagacgggttctggggatcaaaacagggacatctttgagggctgtgtttctgctgaccacgctctcctctgggcctgccctttgcatctgcagatagcagtggactctctttagggggagcaaagcctcccgctctgagcatgggctggactttgggggtccaggactggggaggggtcgacattgtaggtcaccaccatgtgtgactgtccagggaggctgggggatgaaacagccgagggtctgactgggggagagccgagaacacaccccactttatccggaaggccagccatgtctgctcagagacgaagagtcacgggacagccctgtccaagagcaaagacccgtccaagagcagggtcagcacctcggagagttccccgcaggccgccacggggcggggagagaattcatggggcttcgacttagaaggggaacatacaatgctgtggttttcactgcctctgggtgcaactcagcatttccccaattacgaagccagggccttggcccccagcaggaagcctggggtatttcattgcctcacactcacgtcccatctgctgaggggcacgtacgccaccactactcctgagtggcagttgattttacgctcacagattcgtcctgttatttagtatgttaattcaggcggctatgcatggttgtctcacaaatttgatttttaaggaatttaacatttcaaaatacttggtttcccttgtaacccctcaccttttattttctgtacctacggtcatccctcaagagggatccgtaggcctcccctgcctgccctgggcacagggacatcccgaagcgccggtcccagagcctgggctctgctgctgtttctctgtgacttgaggcaagatatcctacgctgccgagatagcagcccctctgcctggggaggtgagtgtgaggaacccggtgtactctgtcgatgtttaagggtcagtgggcgccgaatgaatggtttctgtcagcagcacattctgcatctcccaaaaccaaaaccaaaaggacagccggattttcccctctgcctgacttcactaggctcgcgtctgattttttttttttagcaccgtcagcataagggcctgggtttattttgtggttgtttatagtggaattgggtgtagtgtcctgatttgttttccaggatgttcgttttggggtcaagggtctttggggtggatgaggcgggagaaccaggcttgagtgaggctctgccctcctttcctggccccctggtggcccctccagagtctgtcccggccatggaccccagtccccgctgagccatgcggagagtttgggagaagtgcatacctgccttgggggcttgactggcaggctgctttcctctggctcatcttgaagttaaaatgtagctcagaccctcctcagcccccacgcagggttgcaacctcttccgtctgtctccctgtgaaatccaccttccagggggcagcctgggacctgggatggccctccctacctgaaacctttcaggccttccactgcctgcagggaaaagcaccggctcctttcacggacttccagcaccccttcggggctgctgctgcctggttggtaagccctgagctcactaatctcagccgtcacatgctgttgggcaccagcctgtctctttggaccataaaaacgccatgttgggttggcaggataagtcggcaagttttgatccagggctacagatttcctggttgtattgtttcaaggttaatttctttctttttttttttgagatggagtcgcgccctgtcacccaggctggagtgcagtggcacaatctcggctcactgcaacttccgcctcccaggttcaagcaattctcctgcctcagcctcccaagtagttgggactacaggcctgtgccacgtgtccagctaatttttgtatctttagtagagacaaggcttcaccacgttggtcaggctggtctcaaactcctgacctcaagtgctccacctgccttggcctcccaaactactgggattataggcatgtgccactgtgcctggccaaggttaatttcttgatagagttggacagtcggttttgctacaaagcttgttttgaaaatgagagttggttccagcatgattgatatatcagggaacagtttcaagataacacaagtttcccgttttcctttgtgagatttcacccaccagaagcactgggtgaacacagccactgcccccagctggcctgatgcacctgtgttcacataggaacacataggatgcatacgcacctcacacagccccagccgccccagggaccccatcctcgtcagggcacaacttccccgtctccactgccccgtctctgccactctgcaccagctctccagcccacctccctcggtaaacttacagcgttttcaagcccaagtgccgtgttaatgtgtctctgaaccccttgacatgtgaagctgtgctgccgtttttattagggtttctgtctgttttgagtgccctttccctaaccccattccccaacaagccctgtggttttgactgtgcggttttgcatgcagtgatttctaggaatgcagacgtcgagttgtggtggaatcgactcttctgtgctcatgtgagggaatggccttgttttgaggaaatatgcgctgaagtactcaggggttaaaaatcatatggccagctgggcgcggtggctcacgcctgtaatcccagcactttgggaggccgaggcgggtggatcacgaggtcagcagattgatagcatcctggctaacacggtgaaacctcgtctctactaaaaatataaaaaattagctgggcgtggtggaaggcgcctgtagtcccagctacatgggaggctgaggcaggagaatggcgtgaacccgggaggcggagcttgcagtgagccgagattgcgccactgcacctccagcctgggcgacagaatgagactctgtctgaaaaaaaaaaaaaatcatatggcccgtcaggcgcggtggctcacgcagtttgggaggctgaggtgggtggatcacttgaggtcaggagttcgagaccagcctggccaacatggtgaaaccctgtctctactaaagatacaaaaattagccgggcgtggtggcatgcgcctgtaatcccagctactgaggagactgaggcaggagaattgcttgaacctgggaggcggaggttgcagtgagccgagatcgcgccattgcactccagcctgggcaacaagagtgaaactccgtcgcaaaaaatagtaataattcgtccgtctcctcggcgagtggaggctggggccagggtggaacaggagctccacggtgagccaccccggagtgaaggccactggccctccttatccttgctgcggtgtgggggtgtgggtgtatgacccacagctcacatgtggaaacatggaggccccggggcctgtgtgacttgcccagggtcccagctagcaggtggcagagcaagacctgtatgcagaggcccaaggaagcgtcatgaggacccaggtcaccagtgcatctccagggtgaacctggcccctgcccagcgcatttgcctgtcccctgaaaccgccaccacacaaaaccatgtgcatcttcagagcaggaggcgtctccaccatctgtttgctcccgtttgacaaatggtcggtgctccttgaacggataaacaggaaccatccggccctcttccttgccggagctcatccctttgactccagggagggaggtcatgagcaccacagtctttatgggggagatcactggcctgcccctgggcggagaagccaaactagaaccttctccccagggtgagctcacaggcttttcccatccgggacccctgagccgattggctgcccgggacctgctgttatatcgggggctcccattgcaaagcccctgcgtgggctggcttccccgggtttggtttctccccattgtgcagggtcttggggtagggtctgagccaggtcaccctggagaaccgacagcaccggcccagccccgctgtgacctgctgaccccggaccccgcactttgcttagtgctttaggtctgtaggagtaatctttggagaatcgtgattctgggacccgagctctgagggaacaacctcctctgagcctcccaaggccccccaacattgtggggtgagccccacctcacagatgctgagacaggcctagaggcgtggcgctcccagccccatgccccacatagctctaaggcctggcctcacttgcaggtgagggtcctaggaagctgggggtgggagcaggcctaggagaggcactcaacaaccacggctcagcatggtctagaactgccccctcttcctcccggctgccccgagtctggcttccgtcagacccagcctccttccccagcccatccctctccctctttgatgaggccgatggggcaaagacctttgcttcccagaatgttctgtccctggttggaacactggtccctgggacacagccctgtcctcagctttgaagtcagttcccatcgctgccccccaggtagctggctggcttctgccaacctcagcctggtcgcagctggcacctcctcaccaggtactaaaccagggtgtgcagaggcccgctcgatccatggggcagatcagcaaatggtagtgcaggatgccccatcatatgtgaatatcaggtaaataacaggtacttctttttttctcttttttttttttttgagacagagtttcgctcattgcccaggctggagtgcagcggcatggtcttggttcactgtagcctctgcctccctgatttaagcagttctcctgcctcaggctcccaagtatctgggattacaggcacctgccaccatgcccagctaatttttatatttttagtagagacagggtttcatcatgttggtcaggctggtctagaactcctgacctcaggtgatccgctcccctcgacctctcaaagtgcttatattacaggcatgagccaccgcgcctggcctatttttttttttttcccttggcaacagggtcttgctcttttgcccaggctggagtacagtggcgcagtcatggctcacttcagcctcaaattcctgggctcaagtgagcctctcaccttagcctcctaagcagctgcaactacaggtgtgcaccaccatgccttactaattttctttaaaatttttttgtagagataggggtctccctatgttggtcaggctggtctcaaactcctgggctcaagccagagaggggctggcctggtgctctgggttctccagaccccctcctgccttggtctcccacagtgctgggattacaggatgagccacggtgcatggccacctgatggataatgtctaatataagagaacccctaatttagctgtccctgtacccttgtgaggtgagcagtattgttgcctacattctatagatggggaaacagaggccacagaggcctagcagcctgcctcgtcaccgagtgggagcttggcagggctgggatctgaacccaggccgtcggctcctgggcctgtgtgccccctccatgaccatatcagcttcctacagcttccatgacaaagcaccacaaaaccggaggcttaaacacagaaacgcagtcccccagctccgggcagaagctcgagacgagggtgtggcagggccgtgccccctctgcagcctctggggagggtcccttccggcttctgggggctgccggcctccctggagtggccacgtcacttgttgctgctgtctccctcgtcacgtggcctctccttctctgtctcttagctccctctgccccgtcctgagcacagctgtgattgcattagggcccacctgtataaccgaggatgccctcttctcaagagccgtaccttgatctcatctgcagagatgcttttcccgacgtgaatggaatattctgaggattaggacgtggacctaccttgttaggggccaccattcagctgactgtctttgccaagcacaggcagtggagactgtgtcatgctctgatccgaacaatcgtccttctgtctgccgcccgacttccccagccctgttcagaaagacagaaggaactcctgccccaccctaagctgaagtcgggagcgtgaggaccctttatctggtctttgggggccaggtgggttcacgggcacaggacagcatgacaggcagggcctggcattgggacacctgggtcttagtcctcacctgtgacagcggggggtcttgggcaacgtcccacccctctctgggccttgaagatgaaggggttagatcctggcctcccggagcttcccctggtgtaggatcaacacactttttctgtcaaggactagagagtattttaggctttgctggccctgtagtctaagtcacatactcttctctgtctgtttttgtttgttttgttttgttttgttttgtttttgtttttcctacaacccctttaaaatgcaaaacccgttcctagctccaggccatggctgccattgggctgtgttgagcctgtggcgcgtgcacaggcccctgcccttggtggacactctgattccacctgcaaatcctgagcgcacaccggctctgaacaggctctgtggcttcagaaacttatcttctggcttcgtcgatctggctggtttgccctggggatcccgcatcctctgactaccgtgatgagcagagcgcagcgcccggctccgtgggccaacttttggtgtcttgccctgcctgagcctgttcctccttcctctccctgcccctccagccgctccgggtcctctgggaagctctggcctcttcaccagccctgcgcggctgctggatctggaggccggagccggcacatgcgtctgacagcagcgctgctgtctcttgtttttcgtggtccatgtttgggggttacatctgggcctgtcccttctctgtgtagcctgaaggcagttcccaggcttgtgtccctcacctctccgcagacgccctttccagatcctgttcaaatcctggccctactcacgggaacttgggtgagtcagttcccttcactgagccttcatgcctccctgttaaggagaagcttcactcggcatggcgtggcccgtcacactcatcctgcatctgttacaccaaatgcagtttcctcttctataaatgggagaaaatcacctgtccttgccaagggtccggtgggaattaaatgagctgagccagggcacgggtggagcttgctgagtgttaggtcgtgtgcctgctcttcttggcggagtctggccagatacctcatctggttccattgctgtcagtctctaaatggggcctttcctgcccagctcccagccctggtgctcacaccatcacaggccaaagaactggattccagacactgcctcctccactgtccccacagtgaaaatggggagggatgtccctgtggagccctaactgggacccagacagccctacccccagctcccaccccctccggctgtcccggaggccgtgctccgtggatctcctctccctcgcctccacgtgggctccaggtagctgcacacgcattacaaacatctcgttaatcttctcggaggtcctgcgaggcgaggcctgtggtagccctgcccttggagcactgagaattagtaaggaaatcgccgctgcatctcccggtggcacaggggcgtggaggcgtggcgggccttccctcttgcaccactttggatcctgggtcctcacagcagtgttctctgcaggggaggtgcaggcattggtctgctctagggccaggtggtctaaaaagtccctggtcagccccgagtcctgcaggaatctgcatgttagtgggatttggggttcaggatgcttgcctgctgggtaggatggggttgctgagtgaggctgaaatcccagatgggatgtctgggctcctccatgcctgacttgggaggggtgagaaaaggaaggagacttggccatctttaggctaaaagcctagtgctgtctcacaggagggaagagcaggtctctgcaacacacgcctggggttccgtcccctctggccacttgtctgtcaccttggacacgttgcctggcagcctctgagcctcagtgtgcttctgtgaattggggtgaccctagcacggtgctcacgacagaaagcatgggagtgcagacgtgggtcagtggcccgcggtgagagctccctgtctgccccatggtgagtttccacagcagtgagagaggcctggcgtgtggggtggaggccgggacagtgtgagggccgcctggtcagagcgggaggcaggaccccgtagggagatgaaagccaagctggacccaggcagaaaaagaggaacgaaggacaggaagtccaagagcagtcactgctgacgtgagtgcggcctgcaggcagccagtgtggatggactctcaggccctccgttgtgtgttaggggaccggaggagcagagaggttgcagcagccggccggcctctctcggtgagggccggactgcacatggggctcagaggccgtgggtgtgcctgcccgcctgtgtcagctccagccgtgggggcgggggtaatccgaggctgcgtcccgaggctgtgggagctctgccttcatccttccattcacaggtagggacacaggcgtggggattccacggtgcccttgaggcagctgtttcctagacccccaaggccctgacggagactcccccacccctcaggagcagagggtgaggcggggtctgcaccggccgatgtgggcaactgttgcaccctcggagcccagcagcgagggtgggggtctgtggggagtcagccgcagccaccagcattgctggaatgtgtcagaatggtggtgcctcctgcaaacaaccttagcctctgttcatcctgtcaccagggtcctgggagaagcaaacccacgtgtggcctctgcagggtgggtggggaggttctcccggccaggcctgactgacgcccctgctgctccctgtggtccagcctggacttgccaccgattattctatcaatggcactgcactgggcaccaggatccaagcagtggactgcgggacaggacctgtccctgtgagcggcctgtccctctccccaggcccagcctcctgttggttatccttccaagcccatgcctgggctgtgcgatccacctttcctccaggcactcttcaggcaaatctctggagcacccactgggtgccacacactgcggatgggacgcagggtaccgcacagccccggtcctcagggacccggcggggacagcactggtgaaaaaccacggaagtacattgatgtgtcacttcaacaggggcctacgcaggggcctgccctgtgccaggccctgtcgttggtttgtggggtgaagaccctgttcctatggtgtggacgtggtagagatccaggggctctggcagcttgtatgggggaatggggacgggaggggggtcaggaatgggcttctcgagagaagtgacatttggtcagaggcccaagagcgggaattgatcctggccctccctgaatcagtgtggtgtgacccctcccgccaaggtgagggtagcaaggtgcctggggctggaatcctggggctgtggcccgtacagtcgcccgggacccatgcccagcagggccctgcacccggagtttaacactgaggtccccaccttgaaattcctaatcattgagtctttgtaacttgtgttagggagtccagcgagacaatggggtatgtgcggggtctttggagcttcagcccatgcacagacacgtctctctgttcctcgactcctagcatgctctcacctgcctgccccagagaccaagccccacctggccccttcgtcaccccgaggtggcgactgggttgtgctgaaggagggaggcccacacgccaccactgccctctgacccgtcaggggccccgagggcctggttggtcagggctgggcactccacccaccccggatgacagcaccaggctcatgtgccaggtgactcagccagggccactcaccagcgccacctggtatgtcctgggtggcggccgctgtgcctgctcctatccaccatggttgggcactggctgggaagagaggtgaccaccaggccctaatagcaggagtcacccacacaacccttgtacccagccctggggtccaggccgcctgcaccggctcagttctgcgcctgagctcccagctctggggtccaggccacctgcaccggctcagccctgcacccgggctcccagtgctggggtcccccaccccttggtgttgccgcatcctccctgggcccaagattcctggagctggagaacccccttcctccctgaggcatggagactgggctggtcctgagcccactccaggcacaggggacacacctgcttccttcttaactgagtagagcagagttattttgaagatcggttttcagcaggacagtaaaaaggcgaactgggagattgttcatgcagcagcttctaaaaccagtttttagataaatgcaccttcgtctgtggggggtggccgcacccagcctcgcttcaggtgcctgacggggtacgtgctgcgttcagtcccaggcaggtgtagggctgggcaggtggagatgcggtgccctcgctcaaccggggtctaggctcctcgccgggcggggttcacctgctatccccagtgtgtgggggcgggggtgtggggtgagggagaagagtggggcactgagtctaaacataggctgtggcctgtaggtgaggggaggcggcagcaaggagggggagatcaactcctgaagagactccgtttctaacacgccgggagccctgcgctttgtcatggaaactggcaagagtccctctccatccctccctactcccagaaacaagatggtcccaggctaacgggcttctctctggcctggccctgctcccagacccccgctgagggtggtaaacaccccagccgcgcccttggcaggggttccgtcccaggggcctccctgttctcactgtgagggtgggcatgatgggcagctttgcggagcctcctcagcacagagccgcacatgacgggggtggacagactgtggccccacagccgtccatcactttcatcctgtattgggggagaacggggcttgcttgaggtctgtcctggatattcgtaatgctggcattgacggggccagtgaaggctctgattggtgcgggtgacgaggacacagtcgcagcaggcgtagaccaccagagcagggtgtccacgtggctggccacgtttagttgataaaagtggcatctataaatgggtggtggtgcggaatgggtggttgattaaatggtattgggccgctcaggtggccattggggaaaggtaaagctggatccctacctcataccaaaattattctaggtggataaaaagtttaaatgtaggccaggcagtggcttgtgcctataatctcagcactttgggaggccgacatgggcacatcacctaaggtcaggagttcaagaccagcttggccaacatggtgaaatgccatctctactaaaaatacaaaaaattacctttgcgtggtagcacgtgcacgtaatcccggctacttgggaggttgaggcaggagaatcgcttaaacccaggaggcggaggttgcagtgggccgagatcgcaccgttgcactccagactgggcgacacagtgcgactctgtcattaaaaaaaaaaaaagtttaaatgtaaaacataataaaagctggtttccttactgcataaaacacttctacaaatcgacaagaaaaaaaaatcaaccgcactcttaataacagaaatgtaaattaaaactacaaggagataatgctgggtttcacttgtcttgggagagatttaaaaaaaaaaactgatctactgaattacagaagatgcgaggaaacagaccccctcgtgctttgctcgtgggggtgtaaatgtcctccctggagagaaaattgtgaatctctagcaaagttcagaccccaggaacatttaaactgcagctttaattcaacagcggcacttctggaagtatcttctgaagatggatttgtgtgtgaaatatcaaatatacaaggttgttattagactgtgaattctaataggagaacatggaagacagccttcatgtccatcagcatgggcggacttcatgtgttctggaacggtcattaaaacaagaggctgggcacggtggctcacacctgtaatcccagtactttgggaggctgaggcgagaggatcacctgaggtcaggagttcgagaccagcctgaccaacatggcgaaaccctgtctctactaaaaatataaaaatgagctgggtgtgatggcgggcacctgtaatcccagctacttgggaggctgaggcagaagaatcgcttgaacctgggaggcagaggttgcagtgagctgagattgtgccactgtactccagtctgggtgacacagcgagactctgtctcaaaaaaataaaatataaataaataatttaaaaattatttaataaataaatagaataagaaagctgtgtttgctgatatggaacaatctccaagatacagtgttaagttaaaaaaaaaaacaaaaacaggccaggcgcagtggctcacgcctgtaatcccaacactttcggaggccgaggcaggtggatcacgaggtcaggagatcgagaccatcctggctaacacggtgaaaccccgtctctactaaaaatacaaaaaattagccaggcgtggtggcgggcgcctgtagtcccagctactcgggagtgtgaggcaggagaatggcgtgaacccgggaggtggagcttgcagtgagccgagatcgcgccactgactccagcctggacgacagagcgagactccgtctcaaaaaaaaacaaaaacaaaaaaaagcaggggcagaactgtgtgtggtgggccaacacttgtgtccaggtttctagcatgtgagagtgtttgaaaactggagcctgtcctgtgacggagtcttgtgcagacatgaaaaacaagagatatcctagtgagctcccaaacagggacacccatgacagagtaaaagcagaaacaagtcacaggaaaaaatatgtagagcataaccccatttgtgcggcaaaaataaggtgtgtatgtcgatcactgcatgggagaggaagcgaaagagaaccactcagaatgaagagtcattttctgtgggaagctggacacatgtggaagggtttgaaggaggagttttactttcattctgtacattgtaaaattttttctaaagaacttgtgttttacttttgtatatttttatttatttatttattttgagatggagtcttgctctgtcgcccaggctggaatgcagtggcgcgatcttgtctcgctgcaacctctgcctcttgggttcaagccattctcctgcctcagcctcctgagtagctgggactacaggcgcctgccaccatgcccggctaatttttgtatttttagtagagatgggggtttcaccatgttggccaggctggtcttgaactcctgacctcaggtgatccaccagcctcggcctcccaaagtgctgggattacacgtgtgagccacagcgcctggccaacttttgtatattttaaaaataaaatatccagccacaatccctgagaatagctaggcagtggaaggatgatttctaccaccccatgccccaccccccagctggcagaagctttcaccccccgcccctcccccgccgtttccccgactcgctgacccctcctctgcccctgggccttttgcatcctggagctctcttccccttgccaactcctcctgcctcccaggcctcagccacgcctgcttcctttgggctgatgctgagcaccaacccagagtgtcggtgctgctcattgctccagtgaccccgtccagaccagcctccccgtccagccttcctcttgctcctgggcaggacctgccctgtgctttgaggccctggggcctgcacatatccagcatgtgggtgtgccctgtctgtgtgtaccaggtaagcgggcagatgagcccagcagacactgctgcagccggaggctgccggcagcccgcagtggcacagccgtgctgtgggagggcctttctgtgtctggggctgtgttttccacactccccctctggcttttactgttttgctccgggagtgtggctttctagagttttgtctgattttatagcagagtttctgttaactcaaaaagggactccacagtgaaggtttaaaggtggtcccagctgcagcaggaagcaggtgtggggtgcctgctgcccaggccctgttccccagcactgcttctgacccaggaggggctggggagaggaccactattcctcacctttcatacacccactcccatcctatttcgcaccccttcctccaggctgcctgcacctctgccctgctggcctttcgctctgtaattcctttctgaaagaaatgttttccatgaaacaacaacagcaagaagaaagcagatcagctgttggcaggagctgggaggagggatggggagggcagctgatggatatggggtttctgtcgcaggcgacgaaagtgctgtaaagttagatcacgatggtggtgacccgcctcagtaaatgtgctaaaaaccagtgaattatactctcaacaggagtgtaattgctgtcttcttagaacgtgtggccatggaaatgtgctctttttatgtgtttacctttgtatcagccgtcttctcaatgagaccagaatccctatcagagcaaggaccttgtttgtgtctcccttttcctctatgtcctaatatacaacagtgtgtttagcttgtagcagacactcaatttaacaacatctttttgaacgagtggatccataaatgcattaagtggctctgtgacttcagactcttcttcaggtttacggtatataaatatatcatttacggtaccttcatttatggtatataggtgatattttagccggggtgcagtggttcacacctgtaatctcagcaccttgggaggcagacgcaggtggatcacgaggtcaagagatcgagatcatcttggccaacgtggtgaaaccccgtctctcctaaaaatacaaaaattagtcaggcatggtggtgcgcgcctgtaatcccagctacatgggtgcctgaggcagcagaatcccttgaacctgggaggcggagctcgcagtgagctgagatcacaccactgtactccagcttgggtgacagagcaagactccatctcaaaaaaaaaattgttatctcagccaggcacagtggctcacacctgtaatctcagcactttgggaggctgaggcaagtggatcacatgaggtcaggagttcaagtccagcctgaccaacatggcgaaaccccgtctctactaaaaatacaaaaattaggccaggcgcggtggcgcacgcctgtaatcccagcacttggggaggctgaagtgggcggatcacgaggtcaggagatcgaaaccatggtgaaaccccgtctctactaagaatacaaaaaattagccgggcgtggtggcgggcgcctgtagtcccagctactcgggaggctgaggcaggagaatggcgtgaacccgggaggtggagcttacagtgagctgagatcgtgccactgcaatccagcctaggcgacagagtgggactccattatacacacacacacgcactatatatatatacacacacacacacacacacacacacacacacacacacacaaaaaaaaaaattagccgggtgtggtgggcgcctgtaatcccagccacgtgggaggctgaggcagaagaattgcctgaacctgggaggcagagtttgcagtgagccgtgatcatgccactgtactgcagcctgggtgacagagcaaaattctgtctcaaaaaacaaacaaaataaatgatatctcaataaagctgctaaaaaaaactcgcccaccaggtacccatcaggtatcttatccagcataagaacagctgggctgtgtgctgtctgcacctcatcccatgaatctttgcaggggttctacaagggtcctccttactaaaccccctgcacaggtgaggaaactgaggcccagagattatgcagcctgcccaggtaaagcagctggtgaacgtggacagcgtggcccccgtcataccttctcgccagctgacggtgctgtccagggagtctggaaagcagagatccaaaggaattggctgggctggaaggctccttacagaagagctcgcttgcccattcactcattcatttgttcagctgaacacccacctacgagtgtgtaccaggcagacccgctcctgtctccacgaaccacaatcacagaattgtgtaaacgaggtaaagccggaggcctgagattgtggggatggggattgaggtcaggactgtcttaccaaggagtgacatttggcctgggattgaaaagtcacgaaggaactgaacattaagaccctgtatgtaaggctgggtgtggtggctcccactgtaatcccagcactttgggaggccaaggtggaggaatgcttgaggccatgagttcggaatcagcctgggcaacatagtgagaccccatctctacaaaaataaacaaaattagccaggcgtagtgtcttcctgcccacttgggtggctgaagtggaaggactgcttgagcccaggagttcaagactgtggtgagcagtgattgtgccactgcactccagcctgggtgacaaagggagaccctgtctctaaaaaataagattataaaccagccaggcgtggtggctcacatctgtaatcccagcactttgggaggctgaggcggttggatcacctgagggttttgagaccagcctggccaacatgacaaaaccctgtctctactaaaagtagaaaaattagccgggcttggtggcacatacctgtagtcccagctacttgggaggctgaggaaggagaatttcttgaacctgtgagaaagaggttgcagtgagccgagatcatgccactgcactccagtgtggacagcagagccagactccatcacacacacacacacaatatatatatatgtgtgtgtctgtgtatacacactcacatactcacactctctgtagtgggctgaatggtgtccccaaaagctaggtctgcctggcaactcacttccaacttcttggaataagggtctctgcaaatggaattagttaaggatctgcagatgagattctcctggatcaggctgggccccaatccaacgaagagtgccctcgtgaggcagaagaggagagagacacgtgccggagaaggccacatgagggcagaggccgagaggcgggagtaaggccaccacgagcctgggaacgccgagggcgccagcagccgccagcagctggagagaggatggatgggaggattttctaaagccttccgataggggtgtgacttcttgattttggactccgggactgcaggaccgtgagaaaaggagtgagtgttaagtccacctagttagtggtcattcattaccgtagcccgggacacttacgtgaacttcagacctcaaatcctccccatcttgcagccccaggcgcagacctgggcagtggggcccccgtgtgcccatcccccagctggccaggctcagctgagagctcctcgacctcctgcctgtccctgccacccttaggagtccgagaaactggacctgcccgtggcctggacaccacttcctttattgcttagggtttctctctttctttctttaaaaattttttaaatgaaaaatggggctgagggaagactcggtctaaagataagagaggggtcacctggatctggaatgttctctggctttccaggctgctctgatcgcagacctcctgtctttaacaacccagcctgggtcaggtctgatgaaatgcactttccagggaatggggctggtttgggctctgcagaagcttccctcttccatcctggcaccggcagaaaagcccattaaaataattgcagggagagactgttacctaagtttcctccccttgagctgttggagctcttctttgacctttatggtttttaaaaccctgccaatccttgccttgtcccccggacgcattcatccagtgggttgggaagctggtgttcgctgtccgggctgggtcgtgccggctctccgtgtgtgcacgtgtgggtctgggctgggtgttgacctgctcctgggccagggcccaccagagccttagtccgggtggccaccatctgggaggcccggccgtgtcctctcttaccccagttctccaggcactggccaggggccccctcagcacacatgtcatagttggtccctccctgcccatggcccttcagaggcccccagctggtcttgggaggagggtgcctgtgtgggccagctttcagcacagcccccgccctctgctccagccttgggtgcaccccaaccccacccagctgaccagcctgttggggggcctgtggaccccgcctctaagcctgggtcttcctctgggcacccgttggggacagggcagccacacacccagcccagggtgtggtctccccacccagctgcctcccttgcaaaggcagggttgccttggcaatgacacctgaggaggagacgcttgccctgggtgcgctgtttccctgtcttcagtaagggaggaggctggcttcctctggcggagggaggcagcagctctcctttgccttggaacccgctttgctccagtgatccctgagccaccacattggtaagactggctggagctgaaggtccgagtgtggcttcaggactggtgacgatggccagggatgaagggctgcggcgtgtggaggggctgcgcccggaaggaagcggtgtggacccagaaggaagcggagccctggtgggcagcctggctgtgctctggcccaggaaccgggccttttcttgcctcttgcctctgactcagagcggcttgtgggagcctcgcatgcagggccaggcagggcaagaacgatcgcgaccttttcctccagggaaggttgcaagaaaggcgggatctgtaacgtgactaggtggaggcactacggagccatggtgcaggggtggggggccccaggtgagctcagatgccctccctgcctgtgccaccgtggcctgaccctccacaggtgggagccataggcgtcaggagccattaccccttggagaactgggtgccaggccgagacctggtgtctcatttatgacaaaccgctgcagtgcgtttgggagtctcctcctccatgacgtgcttgtctggattggttttattttagtgcaggcaccacgtcgtctttttatatacgtgtgaacgtatatatgtaaacacacgtatgatgttggtgagttcatgttggtggtatttttactaagcaaagatgtgggaaccaaatgggcccatccggggagtttcccatttggtccctcgtgctgtgtgtggtggggggcattgtggtcgaggtctgaacagccggggaagtgaaagaccccgtcctctccgggagcttacgggagtgggagagacattgacgaaatattacccatcgcaggagtcaggtgcacacagtgatgatagttccgggaggtcaggtgcgcgcggtgatgacagttccggaaggtcaggtgcacgcggtgatgacagttccgggaggtcaggtgcacgcggtgatgacagttccgggaggtcaggtgcgcgcggtgatgacagttccagaaggtcacgtgcgcgcggtcgtgacagttccagaaggtcaggtgcgcacggtgatgacagttccgggaggtcaggtgcgcgcggtcgtgacagttccgggaggtcaggtgcgcgcggtggtgacagttccgggaggtcaggtgcgcgcggtcgtgacagtgccgggaggtcaggtgcgcgcggtggtgacagtgccgggaggtcaggtgcgcgcggtggtgacagtgccgggaggtcaggtgcgcgcggtggtgacagtgccgggaggtcaggtgcgcgcggtcgtgacagtgccgggaggtcaggtgcgcctggtgatgacagttccgggaggtcaggtgcgcgcggtgatgacagtgccgggaggtcaggtgcgcgcggtcgtgacagtgccgggaggtcaggtgcgcgcggtggtgacagttccgggaggtcaggtgcatgcggtgattgttccggaaggtcaagtgcatgtggtcatagttccagaaggtgtccccggggcaggatatgttttcctattttccttggcttccggggagcttggagcctgctttcctttgggtcctgggctgattttcgggcaggtgctgggatgcagtgtcctgggtgctgcagcatggctgagcctcggattctctgtccagggctagctgtgttcaggccgcgcatctttagttttggggcatcgcaaatcctcctggaatctgatgaaagctgtggaccctctgcttgtggcggggggtcatgcagaaaactttgagtacagtttcaggagatgcacggaccacccaagggcctggaatcggagcccccacaagacagggggtgtgctctctgggccagcgtttggagcactctctggctcttggagccctggtggggcattcccagcagcttgcttcatttcctggacacgtgttcttggctgtggtttatattactctctgtatgtaaatgtcataggttttttttcttctagtaaaattgttcctagttagcacagtggaatcttgaaacaagaaagccatctttcatgaacagtgtgtggtttccaggcttagcccatggagttggagtgacaggtatggcagagatggggggtcaggctgcgtagaaggtgtttgcgccccctaggtgcaggtgttaatcctcaccaccagggcgatggtgctaggatgtggggcctttgggaggtgatggggctgaggactgagcctcatagtggggattagtgccctgatgaaagaggcctcagagagcaccctcgcttcttctaccatgtgagcacccagcaggaaggtgctgtccaggacccagaaagtgggtcctctgcagacaccaaatctgctggcaccttgatcttggacttccagcctccggaactgggggaaagcaatgtctgctattgatgagccgcccaagctgcggtgctttgttgcagccccaacaggctaagtcaggaaccgtgaacaggagacctcccagggagtctgctcggaggggggatttgtcgtgggggaattggtcattgtgcctcagtttccccattgttggggaagtggtgcccatggccactggcaggcccccccgggggccagcacaccaggtaggaagaaatgcaagccccaggctgctgagatgcacagagccccacattctgccttcgggacgtctgtctagtcccttgtcttacaaagggtgggcaggtcccctgcaggactcagcagagggagagacacagtcagggagcggccagaggggtgacgtgcccggctgcccacaggtacaatggctccttcgtgtcacacatgggtgtcggcgtcatctttcggctgggtgagggaactgcccagctgcccaagccctgggttcccaagtcagagttgctgggattactgggcagggaggtggtcccgcaacccacaccggggcagtggcaggaagcacagacacacacagcacagcgggccggcaccgccggggtgggttgtctgggcttggactctttctgtgcacatgctgatgtttgttgataataagaacagaaacattttctttttttttttttgagatggagtcttgctctgtcacccaggctggagtgcaatggcgtgatctccgctcactgcaacttccgcctcccaggttcaagcaattctccttcctcagcctcctgagtagctgggattacaggcacgtgccacaacacccggctaatttttgtaatttttagtagagacggagtttcaccatgttgtgcaggctggtcttgaactcctgacctcatgatctgcccgcctcagcctcccaaagtgctgggattacaggcgtgagccactgtgcccagcccctccccttttttttttccttgagacagagtcttgctctattacccaagctggagtgcagtgacgcgatctcagctcactgcaacctccacctcccagattcaagcaatcctcctgcctcagtgtcccgagtagctgggaccacagatgcgtgccatcacacccagctaattttgtatttttggcagagacaggcttttgccatgttgcccaggctggtcgtgaacgcctgagctcaagcgatcttcctgccttggcctcccaaagtgctgggattacaggcgtgagccaccatgccctgcccagaggtgttttcaagcatgtcctgtgcactgggcctggttggttgatgctcagtgatgtttattgaatgaatgaatgaatgaacgaacaagatccagaagtctgagggtaaacatggggtgccagcatcttgtcttagcccagcccgttgttggggggttggcagagtacctcaacccagacccctgtcacctgtgccccctgccccccctcacgctcctccctgtctcccccaggacctcccactctcgggcaaaggccgaggcagccctcacagcagctcagaaagcccaggaggaggcgcggatcgccaggatcactgccaaagagttctccccttccttccagcaccgggaaaacggtgagtctcgccgggcctgatactggcatcgtggggagggggtgcgtggatggctgggcagtcctggcagcagatgtgtcctccagagcgggtaggcttagatgggctcagccccagctgctcccctgcccggtgtcttcctctcccgccgaaggtgcttgtttgtgccaaggcctggcctggctccccgggacacaggacatgtgtcttggcaggtctctcccattcccacagtccttggggcaccgcgtgttgcttgccggctgtccctgacggtgaattcccacctgcccagcctgtgctgtctgctgcccgccctcccccagtgttgttctagaaccttctgggatgatggaactatctgctgggtccagcgtggcagccattagctgggtgtgtctgcggtcctggctcttgacctgcctctgatgtgaactaacttaccattaaacacacccagtggctgctgggttggacagcgtcacaaatggcagctcccgctgtgcccctcggaaagagctggaagctgctgcctgatttaggaacctcgtcctcccttcgagggggggatcatgggtgatacggcccagtgacagtggcgggggcgtggagggtgtggggtgggtggcggagaggccgtggccagctgcctcccatctcctacctcatcttggaggaagcttcctctgcaccaggaggccccagagaatggggttaggagcgcgccccctcaacccgagctctgaccggtgagcggtattcggatgaggctctgcgcgctggaggtccgcacctgacaccacagccctgaacttgctcgcaacgcctgccactctggccaccaggacaggatgaggagcccagcctgggggctgcggggctgggcgctcccctgactggaacgcgagaccacatcatctctagaggtgaccgtccgccaccactccaagaccttgccttcactgggcgagtgccgggccctgcagagcctgcagctgcagcctggaggtcaggaggacgagcccccgcacccccaccgccttgggcagcttctattccactgcgtcccctccactctcctggcccctccagacacacgcaccccaaagtgtccaagtgggagggcaatgggccacgtgcccctgtggccattggcatcctccatggtctcgccctcaggccctgagtttccttctccctggggcccctccttgcctcgcccacgaccagctgcctgggctgggaggcggtggggcgcacacttgggggcacacgtgtagcgtgcacgtgcatgtggggagtgggtgcagtgctgcgggatggacgaacggaacagggatgctggagaggaagccagtgccgtcgggggcacctgccagaaccctggctgggccactccacgcagaatgcacgtaggacggcatgggattccacgtaccaaccctggcccatggtcgcctcagctccagccctgcctgcgactcacattccactgcctgcggcctgttttgtttcctctcagagcctcagttccatgtgtgaaaggaaggggaccagacagggaacattgaagcctccatcctgtgccaaatcccccaagagacgcatccaccggaagctcccaacgtgacttatttgggaggagggtctgtgcaggtgtcattatggaacagactttgagacaagatcagcctggattggggtgagtcctagatccacgcggcgtccttagaagagacagaagaggaggagacaggggcggatggagtgatgtcagagatcactggagactccgtggctggagggtggctggagcggagaccctggaaggaagcagcactcccgacacctggatcacggcttctaacttccagaaacacgagtttgccttttgggtgtttctacccccacccccgcgtggtgctttactgctccagtcccaagaaatgggtgcaggctcccccaccctgagaattccagttaagactctggagtcggagatgcttcctggagggctcagtcctggagtcagaggagatgcttcctggagggctcagtcctggagtcagagatacttcctggagggctcagttctggattcagaggagatgcttcccagagggctcagtcctggagtcagagatgcttcctggagggctcagttctggattcagaggagatgcttcccagagggctcagtcctggagtcagagatgcttcctggagggctcaatcctggagtcagagatgtttcccggagggctcagtcctggagtcagagatgcttcctcgagggctcagtcctggagtcagagatgcttcctggagggctcagtcctggacttggagatacttcctggagggctcagtcctggattcagaggagatgcttcccagagggctcagtcctggagtcagagatgcttcctggagggctcagtcctggattcagaggagatgcttcctggagggctcaggtccctgcaggaggggccttgggctgaccttttaagtcctgaagctgcctcctccgacagttcttgtcttcatgatacagatgcgggcccctgtgggggccgctgtgatggagagacggggccgctgctgcctcactggtgggagtccagtcctcgagggtctggccaagttggcctcacctcctgctgctgcaccttggagcctggctcactctgagcacctcggtccgatctgccacctctttgggtggcgccccggagccttctctgagcagcatcttccctggagggggcgttgggaccgtgtgttttttacaagcgctgggactggcatgagatttgatccaagcatttcttgtttccgccttggatgcattcaggatcagtgttcccagaccaggcaccccggggccttctcggctgctggggaggggtggggctgggggaagctgtccaggtccttcctcagtcgtcctcacagccaggagctgaggtcaccaatgacagatgacagaacagagcctccaagaggggaacagggttgccagagcgctcaggcaggatgtggtggaatcaggatttaaaacgaggctctgaagcctgggccatgccggcttctagagaagcaaaccatccagcgcttcggctgcagagagtggctggcgccagcctcttgctgcctgtctgggaggtccctggcagcctcccagcccgagaactctgaccgtcagggttctgcccaaggccacgtgaaggcaggaccatgaaggagcctggccatgcggtgtccagtgcccaggccacttccggtgccatccgcccccgccccagaggcaggaggactgagcgtcggaggctgcaggacgcaggtggcttgaaggcacaggaagaagctgcaggggcttcacgaggacccgccctgcatcctcaccacgaggcttctaggaacgttacctgctcagcagctcattctagctgagggtgccctcctgctggtggtgctgggagtcggggcccctctagcgtggggtctcctgggccagccaggcctgatctcggcagcagtgggtggacgacctggtgggaaaggccggggcgccatcgggggatggggggggccttgatcccagcctgctaggtccatagcgtctaaggcacaggaatgccagccccttggaagtcccatcctggccaaggaggaggtacgatgtgggtgatccgtgggcatgattgggggcctctgatggggccagggctgccctccacacaggaccctcacggggagagaggtggtggggctgggcgtcaggtgggtacgtggatgtcagcacagttctacacagaccttctctggcccattccctgctctgctcgggggacacccaaccagcccagccctgtttctggggagtgaccacagagaagcagtcattgagacctcagagtggcccacccacacccccgtgtgacaggaactcagacttgggagggctggccacccacccagagctacccagctgtgccccaagccccaggccagggccatggcctcgctctgctcagcactgcctcttagaccagcaaggaggaggacacagcagcccagcctggtggcgtcgcagcgtgccccgaatctgcttgctaacgtctctttacaaacggagggactatctggtgccacaccgagggtagccatgtctcccagaccttctcctgccaaaaggtcagactggggtacaggcgtctcccagaccttctcctgccaaaaggtcagactggggtacaggccaggagaatgtccgagcgtgagagactctaagatgggcagtggctcttggtgtccgagctggtctcatgaggtggccgccccgggtagagctctgagacctccgtcctcagagggaagactccccaaattcccacagagctctgcaccattttggctcgggcaggacggggatgctgggggcgggggtcccactgttctgtgctgagcctaggacgctacttgagatgaacgtgtaactgttccccggagggtaagaagcgccgcgttcttgggtttctcctaatggaataaagtcgggcatggctcccgtgtccctgcgttggcaggaaatgagatcccagtcaatgttcttggttctcacctcctgctgggggctcacggagctccggagaagtctcggggctagtcctacaatgctgcccctccctatccaggcctccgggtgggggctgatggggactgagccaccggcagacgacagggactctgctggctgcagagctggcccctgggtcctgtggtgacctccccttccggggagccccgccctaggacttgaagccccagcagcctcgaaaggtggggagggaagtcggctcctgggctctcacgctggccccggcactggctgtttctcagcaagactgtcccagcaccctgagacacagtcccaggcgggtaggggtgttggcggccttgctgtgacagctcggcctccccagacaggtggtcagctagggtgaggggcttcctcttaccctcaggacaggcgagtcagggttggtgggacctgagtccacaccccagcgtcctcacgcactttccgagccttgggtctcccttgtagcctgggagctgctgtccgcccttcctgtggtgcctgggcctagccagtctccctccaagtgtctgtggggtggggaccacgggggtcccacagagggctttgggagccacggtccccactcccctcccttgcctgcagcctttcggtgagtgggaagcgcctctgctgccctgaggttccctctggcgccctggcccggggaccgcggcctcgctgtggaatgtgctgggtaacgccgtctggcgtcgtcttgtgtccccatacagggctggagtaccagaggccgaagcgtcagacctcctgtgacgacatcgaggtgctgtccaccgggacacccctgcagcaggagagccccgagctgtaccgcaagggcaccactccctccgacctgacccccgacgacagccccctgcagagcttccccaccagccccgcggccaccccgccgcccgcgcccgccgccaggaacaaggtcgcccacttctcgaggcaggtgtcggtggacgaggagcggggcggggacatccagatgctcctggagggccgggccggggactgcgcccgcagcagctggggcgaggagcaggccgggggctccaggggtgtccgcagcggtgccctgcgcggcggcctgctcgtggatgacttccgcacccgaggttcgggccgcaagcagcccgggaaccccaagccgcgggagcggcggacggagtcaccccccgtgttcacgtggacttcccaccaccgggccagcaaccacagccccggaggctccaggctgctggagctgcaggaggagaagctgagcaactaccggatggagatgaaacccttgctgaggatggagacgcatccccagaaaagacgctacagcaagggcggcgcctgccggggcttgggggacgaccaccgccccgaggaccggggcttcggggtgcagagactgcggtccaaggcccagaacaaggagaacttcaggccggcctcctccgcggagcccgccgtgcagaaactggcgagcctgcggctgggcggggccgagccccggttgctgcgttgggacttgaccttctccccgccccagaaatccttgcctgtcgctctagagtccgacgaggagaatggggatgagctcaagtccagtacggtgagtgggcggccaccaggctggtcccagtggaggcaacatccacctctctgctgacctggtgtttcctgagggtttccagcaaggtcactgctcccctgttcctctccaggggtggagtagggtgggggtacagccgggagtggtggccctcaggtcgctgggaccctcccctaggaagccaggtggggcaggtgtcatacctctttccgtgagaggctgcccccaggttgtccagaaagcacacgaaactcctggtttccaggcagcatgggatccctgcgctccccgcaacgtgctcaaccccagctgctccaagagtctgtgcccctggtcagtagccttgggccgtgagatgaccgcttgagtgtcctgtgtcctggataggaacccagaggcgaaacagctgggggcaaggctggccctggggctgggagtcaggtctggggttggggggagctgccagtccaggtttctctcacccatggggggtgttggggttggagccggctcccacgtgaggcccgctgtgtgcaactcaccgtcagcctcacccagcaccccccccccaaattcgttcctccagggcaggcagcttggagggaagaacagcgtccccctgggctagactcggcgcgaggctgggggtcccaggctagactcggtgtgcgaggctgggggtcctggtgcctcacacagggctggcctccccttgaagggaccttcactctgcaaatcccaccctgctcccttgaccagtgctgcaggaatgaagggctttgggaatgaagggctgtgggacggtggctacataggatctgcgcacggccaggccctcaccccagcagggctctgctcgctcgtggctgccaggcagtgcgtggtgctgaacagaagtgctgcaagccagtctgcccctcgggtgtgaggacgcaggggggtgtccgcagggggcgctcagggcgtgtgggccgggcaggggggaccattggtaggtttattgtcgacgctgcggcaggggtcggtgtctgtccctgcccctgacctaggggagctgtggttttctcctcctgccagccccacccccagaggggtcaccgcgtgacacccctttgaaggggcacgtcctgccgggcggcaatgcctgtttctgcctctccttggaaccactgcggacgtctgtctgtcctgttgggttcctaagatgcctccccgttccccaaagcccacagagaacagcccctatgctcctgctgggaccaaaataccagctcacacttacaacttgattttccccatcgcagccggagatgtgtgcgtggctgtgcgcgcgcggttattttaggaacagccaagcagtgggcagggtgggaggtgtagggacgggttctatttttagcctgcttaatgcactgacacttttgggtgcttttaaatgaacctccctgggggtcaatgcacaagctggggacaagtgccaagctggcctctgggatgagttagcgacacgcagggtgctacatgctgccctggtcctgcccggtctccagctggggctaatctggaggtcccgtcagctgcagcatcatgtcccacccaccctggaggatgccagctgagctccttggaagtggccaccctggggtacctggtgctggtgcaaacaaggtttccctccctgtctccctccccgtctccctccccacagctttggagctgtgttttctgccaggtctgtgaggggagatggtgtgtagaggcgcggtcaatcctaagcactgttccaggccctgttggtgggaagcaggaggggcccgtgccagccggcatccatgtcaggggacaggtgtcagggcagtcgggtgccaggctgggctgagtgccttcagtgccaccccctcacaggggtacagctctctgcagtgtctcccctgggccaccagcagggtctggggtgctgtcttctggccatccccctccaccattcccaacatgctgcagagctcacacgccagaggccctgggtcccactggccacagatgggcctgggattctagcccacatagggtcccactggccacagatgggcctgggattctggcccgtgtagggccctggcaattcagggtaaagtcccttaggatggaagcacaggttctccctaccgctctactggtgaaggaactctggccctggctgtttccctcttggtgaaatgatggatatgacctgatggtggggtccagggttggaggatggctggggagacagaagcttccctcctgcgggcagccacgccctcgcccacagcgtccgtacctgcttcccggcccagagcacgggctggactgtggcagaagaggtgccactgaccaccccactctgtcctgctaccccactacaggctgactagcatccggcccttcctcctcgctggggtgggggaactttgcaccaggggtggcatcagtgggcagggctgggcccttggctgttctctgccccctgcaggctggcccggcccaaccaagttgtcatggggcccaagactcacaatacacctgcctgaggccacgatgccacggaaagctgggctcagggcagcttgctttctctctggctgagtggaggcccttgctgtgtccacaactccacttccatctgcgcctcaggtccctgataggctgggaggttgcggagggtgtgggcctggtgctgctgtggctgcaggtgccccctaggcagcacctcaccctctgaggaccctcctctctgagctgcatcccaaggacagtttacaaagccctttgctgactggggttcagcttatctgttgagcaaactttttctttaaaaagtttcttggccaggcacggtggctcacacctataatcccagcactttgagaggccgaggcaggtggatcacctgaggttatcagttcgagaccagcctggccaccagggtgaaatcctgtctccacttaaaaatacaaaaattagccgggcatggtggcacacgcctgtaattccagctactcaggaggctgaggcacaagaatttccagaacccgcaggaggcagaggctgctgtgaactgagatcatgccactgcactccagcctgggcaacagagcgagactccatctcaaaagtttctcaagccagtgtctctagggcctgagggctccaatccccagtgtgaggtgaggcgctcgggcctgggagctgatgcccagcatacagtcgggggtgcccctgccaggtgtggtgcagagcacggcgggggtgtgtgagacctgaggatagcgtctggatgtttctctcacgttaacgggaatgagataggctcattggctgctcatccccaaatccaaatggaaaaccgccattcgggccaggcagaggcaagtactcccacccgttgccgctgccgtgttgagcccaccgtgccgagtggtgttggcaggagcctcccgaggaagctgtgccaacgcaggagtggtcagagcctgtccaggccacagacggggctacgatgagcactgctgcccagggcatgttgggggcagctcctggagaccacagggaggggaggtgggcacccaggtgtgggcagaactggaccaggaggaggaggggcagcagcttgctcaaggcacagggcctcagccacagggtggcgggctgggaaggggcgagggtgtggtgggttctgagtgccccatgcaacggctgttttgggccacgtgctcaagcaggcacccagggaagaccagcctaggtgctggcgtgaggcccttcaacatcagctacgatgctgcttcatcaggagcacagcctggggaaagaatgaaactgacccaggagacaaaagggtccccgggccagacggtcaagcaggaggctgcttcgctgccgcgggatgtggcatccaggctaggcaaggggacggcaggctgccatccccagagggagttctccgggcaaggccgtgaccccactggggctctgagtttgcatccttcctgtgtgtcaagagcagagccggccactgccagcccatagctcccatggtgcggccctggagagctgacttcatgcgggatgtctgctgttctttgcgtagctttactgagacagaaagcgtgtactgttcacttcaggtggccacagtgtacaagtcagggattttagtgtattcccagttatacagccatcacccccaattctatctagatcagctccatcaccttaaacctcagggccattgagcaggcacttgctgtcccctcctcccccagctcccggactctgctttctgcctggtgcccagcttctcacgcagcatgcactgctcctgcgctttctctgtggcagccgcggttgcacggcccatgtcttccccgctgtgtgttcatcctccactggacagctggctctgcttccactccgtggctgttgtgaatcctgctgccgggagtgtgtgcacacacaaggttttgagtggaggcttgactttgccctcttagatttaggcctgggagtggaactgctgggtccccggtgttctcatcaattctcttccagtctctgggagaggagccagcagcagctgcttcgttgtgggtggggggaagggggaggcccgttgttcgggctcccctccttaatgcaggcctgagcagccctcacctggtgccacatgagctactcagtcttaacagaccaccccatcatgtctttgaaatttgaccagaggccagacttgggggcttaaaggagtccatggaaaaccagtctgttaacagggagggggaggagagtagccatccctgaggaatgtgcatcctgggaccttcaggacaagccctggtccatctgtgtcgcacagcagcaggatgtctgcgtggtaggaagtggagggctccgggggctctgaacagctccttaccacagtggggtctacatctccttccaggtggctgcgagatgcagggcgtggtgggggtggggagaggcaggggcaagtgtcctctggaagcagactgtgggcaagactggagtgggtgtcccagccattcctgggctggggccaccgtccaggaggcgtccattccctgtgcagcaggtactgtatctgtagggcagcacccacccctgccgtcctgggagcttcccagaggggccacgctccctctccccctgcctggtgtgagcagaacacagcagagtgcaggactgcaagaatcactgcagaagggcgcccccggaaaaggctctgttgtgagacgtgtcctacctggccccggcaagcacagggaaggtggcagcttggtccgagtgcccaggctgtgcggctgaagggggagtctggcacttggggctccggcggaggctgaggacttgtgagccacttcagggaggtggtggcagcagcattcaggaccataacctaaatccaaggcagctcgcaattggacacagtcctccagagccagttggcgtgaggggtttgttgaggaaggtgtggtgagggggggttttgttgaggacactgtgctcacggactttgggagtcctctgagttccagggcctctctgctgggctgcatctgacactggccatggcagccatgcgggcccttctgagattctgaggtcccagttccacagggcaggagaagcctgctgactggcacaaaggccacacgcaccgagacgtttgcttgcagggaggcctgggtggttctctccaaggggaccctgggagagctggtactcagggtgtcggggccacaagggaattccaagggaattccaggaccagcaacctcagacgtacaggcagctggggcttctctcccgcgtctggacttcacggagctcaggttctggtgggcctttggtgtccaagcgtttctaacatcctcccgtacgcttccacccccgagggtctgctagcttggtgaaaagacgtgggtgggaggcgtggtggcccaggcagagccccccgcagctgtcgctcacctcttcccctcgctctcttccagggctcagcgcctatcctggtggtcatggtgatcttgctcaacatcggagtcgccattctgtttattaactttttcatctgatgagatgtcgcggtagcaaaaatagagaaagggtagaaaaaagggacattaaaattaaaagcaaaaccacaagaagggaaagaccgcaactcggacagcccagcgacttccaagtcctctcacagaagaaccacacgattgggtatcactcacagtttgcctttttttctgggtaatgttttttggattttagccaaaattctttgcttgtataacactctgctgtgtggcatggcagaaggaggccagcacgcagcccctccagctccacgtggagacagaagggatcccggcacatcagtggtaacagcggacgttgtcctcgtggtcacacgtcccgtcttgggtgtggatggagggcagcccggggcagagcctcagccccgcggcccctgagtggcagggctgactcccgtcgacacgagcttagaaagtggattcactgctttctctgtctagaacagacgggtgacaagtatgggcaggaggcatggggcagggtggcccaccccagtgggcagtagcctggcctttttctgtgtgagatctgtgctgcacacctgagggagggggagggatcggccacctcctccctgtgagacggatgcaggtccttccctcttctcggcactgcccccggccttccatgagaagccgactccccacaccgagttttaaagcaaagcccttttcttctgctgcccactcactgtgggtcccattcggctgtttcccccaccagaccccagggaagccggggcccactccgatccgcctgggctcagctaagcacggaagccaagggggctgtgccgtggagctgggctcgcgccggggctctgggtgtgtgcgcttggcgtgcagggtggacgcgtggggttccgtgtccccagcagtgagggccctagaggacgccttctcccatggttactgatctccacgggttttcacatctctgtactgtgcctgcctcaacttcccctaacagatatgcatattccttccagatgcctcagtgctacaccacagtgggcctggtcccaggacaggaatgcggttcaaacccagtggcttgaaacttcctgagaaactgtagcatatccagccccctaaaatgtacaatgtaacttgttcagtccaacaaaaacaggttccttatgtttctgccttctccaccagggtcgctccatcacccaaacaaaagaacaaggtttgccaggatgtccgagtgccccctggccctggctctcgtgtgcatggacgtgcctgaggggtccgggcacggccatacgcaggacccctgtgcccggggaggcgctgcagggattccccatccggtcgtcttggggccagcccgtcttatggactctgccttgctttgcttatgtttagctgtttctctgctacctttcgagcagacttctttactacactgcactggattgctatatttttaaccagaaataaactaaagattagagcatgttccagttaaattcagttttattgttttccgttacatgttcactccctgttccttctcgccgcctggtctggtgggggcataggagagggagggaggactgaaggtcatacatttctgataatgtcgctttctaaagggctgtgacatttttgtacatcttttccatcttttagtagcaagtggttgctgcagaccagaagtgaaccaaataaagactcctgctctgtgcagctctcagactcctgctctgtgcagctctcacaaagatcacagctgcttttgtacattccagtaactgcatgacacaaaacggtacctgtgagcaggaaacacattcacaccatgagacatgcacagaggcaggtgtccctgagcgaagttgtgcagagatctaggcctaggggcagtcagctcctgccgcaacacaacctagaaaaccaaggcgagaacggccccttgccttccagcagcgagggcagagggcaaagccacttccctgtgaattccaggaggattcaaccaaggctaaaatgccccgggtctgagagaatcgaatctttaattggtttccacatggggtgattaagcagaaggctgcttcccgcctgtccggagcctcggccttccctgacaggcacgcagtccctccgcccaggcccaggggacctgcttccctgcacacagtcgggcagggcaggacagcatgtgcccggctggctgctgctgcatggagaatttgacgagttttcattaacccgagagcagcctggtgagagccattttccgccccaatagcttcttcatgtttcacctgtgcacccgaggccaggaggaagtggtggcatcccctgcagacagcagcgcggtctgcggggggtgggtgtggacagcccatgggccaggctggcgtctccccacccttacaagcctgcagacaggtccacctctggcccaggaacagatgagccccgccctggaagagctggagaagaccctctgccccggggcctctggtgaaactgtctgtgcccacggctggcctgttttacttaccagcctctgcacactggatggactggtgctttctgaagttcagtagcgcacagaatgtgcctggataatttcgggaactgaaacagtctctttatccattcttttggatctagaaccattacctcacaggattcccaaagatacagatcaggcatgcaatgcctgagccgagctaactgacaagacagtggtgatgtagaaaagcagggcagggccgggcgcggtggctcatgcctgtaatcccagcactttgggaggccaaggcaggtggatcacctgaggtcaggagctcgaggccagcctgaccaacatagtgaaaccccatctctactaaaaaaaaaatacaaaaattagccaggcgtggtggcaggtgcctgtaatcccagctactgaggaggctgaggcaggagaatcgcttgaacccgggaggcagaggttgcagtgagcagagatcgc

SEQ ID NO: 291 - DNA, 266095 bp, Homo sapiens
  source 1..266095: mol_type = genomic DNA
gaggctttcatgggcagggacaagcgcctctgggcagtcccagctgggggtgcagccaggcctctccctccagctccaaggcttcctgagaagttaagttgggggtggtggtttgtgggtgctggaggccagaacaggacagctagggagggggcagaagggggtcccagtccaggctacagcagcggggctctggggttacatgttcataaccaaccttgaaacagctcctccttcgggattgccatggccgtgatggggtctccagcctccttagcagggtgctgagtacatttggcagcatgcgggcgtggaactagtgtccctcacttgcccccatcactcatagggttgggcctgcagccctcacctctccaccaggaagaagtgggacttcttttggggcctcttccttaccttgaattggcctcagttcttggcagctgagatgtaaaccacaggagcagggccatacctacccaagggcagagttgtaccaggaagctgggacttcgttcttttgctggcccagggcaggccccaggcaagccagggttggggtctctgtgggaggtctgggtcactgctgggtcccattctgggctctgggcccaggtatgggctggtgggcgttaaagggcttatgcagggctgccccaaaaatgggtgaatgtgttagtgcatgcacacacacaacacacactgacaggtacagcctccccagccttgctccaagcgggatgcctggccccaaacccccagtttcagtgaggtggagaaatgtgtcgggaggaactgcccctagggatccccggcctgagccttcatagggcacaagactggaatgtcagcaagaccggcacaagtggcgtcaactccaggagaccacctggcaggggctggcaccatgggctaagaatcaggcaacttaggttctagtcctggctctaccatgtagttgctgtgtggccttggacaagttactgaacctctctgagcctatttcctgatctataacatgcagctcatactaccttttagggctgtttttaattcaatggcacatagtaggtgttcaataaacattaatttcacacagatacctcaacgccctggggagtagagtagaaagaaaactaaatctagaagcaaaaacaatttcaaatcccacctttgccatgcattagagcagttacatatagaaaaaaacacttcacctctctgagccttagtttacttttgtaaaatggaagcaatgcttatttcatgaggttattttaaggaacgggttaaataaatgaagacttctgtaaacaggaattaccattacaggcaaagtatgtgagtaccctcccctccctttcctgggacagagtgaactttggttcaaataaaacctaaacagggccaaggcaggacccatctctccatgggctcaaataacaaaccgaacgacctattctctccatgggctgaaataataaaccaaacgtccttcctcccttggaccataaatttttattggcaggtcaggagaagagccgggggtaagggtcccttccttcccatccctctacccagaagacaccctccaaaggacagcagaagccccagagcctgctgcctcagaggaccttggaggcagacaaattgttgtagtgatcttcctgtccctcgagcaggctgcggtaggtggcaatctcctgctccagccgcgacttgatgtccatgagccgctggtactcctgattctgccgctcactatcagctcgcacatcgcccagctgggcttcaataccgctgatcagcgcctggatatgcgccagctgggctccaaagcgcgcctccgtttctgccagtgtgtcttccaaggcagctttctgaggatagggagagggggttgtgactcagcagagcctggttcccggagagggcatgggcacagccaccggccaggctgccctaggctgcaagggtataagtgtgaattgcacagggaagcggcggcggtggggggacacataccatgctcagctgtgactgcagctcaatctcaagaccctgaagggtgcgccgcaggtcagtaacctcggacctgctcatctggagctgctccgtgtggccagcgacctcccggttcaattcttcagtctgcagagagaggaagaagagggaataagcattgagtcagaccttcgcgtagggaacacaaagccctccccttcctaacccccaaagggtgcctgcttccctctacctacccggctggtgaaccaggcttcagcatccttccggttctgctcggccatgacctcatattggcttcgcatgtcactcaggatcttggcgagatcggtgcccggagcggaatccacctccacactgacctggcctcccacttggcccctcagcgtactgatttcctgtaaagatacagcagagatgggcatgtcagggcccagaccccactgggcctggcccaggtcacttccccacccttcaggctaaaggggcttagttttcaggtgcaggcctagtaactagcactgggggacagactgggtcatcactgattcctcttggaaccctgggatccatgatcccacacccagggccatggtgagggtgcaccaagtgttaccacggtcagagaatacagaataaaagagtcttcagccctgggaggttagggaaggatggaagaaaggcccagcttcaaacccacctcctcatggttcttcttcaggtaggccagctcttccttcaggccttcgatctgcatctccaggtcggtcctggccagggtcagctcatccagcaccctgcgcaggccgttgatgtcggcctccacgctcatgcgcagagcctgttccgtctcaaacctttcaaaggaaatagttgcagccaggcagagcttcctcagcatctctgaagacttccctacctccccagagttcaggagtccataggggggttagcttcaggccatctaggctaggtgagggcagattctaaaccccccaacccctaccccagtcctggcttctgcagcccccaggacagagacactcacttggttcggaagtcatctgcagccagacgggcattgtcgatctgcaggacaatcctggagttctcaatggtggcaccaagaatctggaaggcagaggcagaggttggtaccagttcaacacacaggcactgcccactcactttcttcccagaagagagaggggagcaaatgaatataccccggcaccctagagaccaaagccctagccagcatctgccgcccattggcccgctctctgggaggccttgcaaacagtccatgcccagaagctggggcaggaagaaaactggagccagggggacttgggtgggggagggcaggaaggcaagcctggggaggaaatctctgagacctgtgtgcaatgaaactctaaatggcctgaagggggtctataaaccagatggggggtagattttgtctatacctgccccccccactatgcgaagcatattttgcccccagggaagagaatcccatttgttgagtatcaattatgtgccaggcactttgaatctcatcttttatagcttctggaacctcactgctaggtcagtgggtactcctatcttacagaggtggaaactaaagtttaggatgatgcctcatccaagttcaccccaacctgaggtcttactgacctaagaggcgcattcacaacagccagcttatcattgaataaggtaattgtgttctgtttttcaaagagcaggtcatcactcattagtcaaggcaccaggtggtgattgtatagttttgtgttttgggggggttttttggttttgttttttggggtttttttgagacagagtctcgctctgtcacccaggctggagtgcagcgtcgcgatctcggctcactgcaagccccgcctcccgggttcacgccattctcctgcctcagcctcctgagtagctgggactacaggcgccctccaccacgcccagctaatttttttttgtatttttagtagagacggggtttcaccgtgttagccaggatggtctggatctcctgacctcgtgatccgcccgcctccgcctcccaaagtgctgggattacaggcatgagccaccgcgcccggccgattgtgtagttttttaatgcaacagaataggctacaaaatatcagaggggatttctcttagtatggtgagaattgtgtcacccatttgtgtgtgtgcatgtgcacgcacacacacacacagaggtgagaaaaagaatgcgtaagggtgcgtagtaaaatgtacttattgtcgcaatttttttttttttttgatacagggtctcgctgtgttgccccaggctggagtgcagtggcactgatcacgtacagctcgctgcaaggcacacgccaccatgccaagctaattcctttttttttttttttttttttttttttgagacggactctcgctctgtggccgagactgaagtgcaatggcgcaatctcggctcactgcagcctccgcctcttgggttccagcaattctcctgcctcagcctcccaggtagctgggattacaggcatgcaccaccacgcccagctaatttttgtatttttagtagagacaggattttaccatgtttgccaggctgatctcgaactcctggggctcaagcaatcctcccaccttggccacccaaagtgctggggttacaggcgtgagccacagtgcccagcccctgtaggtcacaattttacaagtgtgtaaagcactgtttttgttggctgttgacatctctagcgcttcctcctggtctgtgggtctgggtctatgccacgagtacagcactggaaaatattttggggatctgtttgttgggagacccagcgtgtgcggctgtaaatgttccatggcttctgatacatttctttacgactcgaaaaatttctccttccctctgggtggagaccaagccctacccctcaggccccttagggttcccctgtaagagcgtgtgacgcagatccgttctttccccgacaaggagctgccactgtactgggtcctccccagcagaggtttaccaagcctccctcctttaccccgcccaggggccacgaccggctctcccattcttcctaaacgaatgggccccagggcgggagagtgggaggaggccaaagcctgagagggatgaacactagacccttccggccagagaaacggaatgcaggaggccctacgctgcggtggcagagggggcaagactggccccgggtggaccagatcaccaaagccaaactctcgcatcttcctgcggcagcgcggcccctggcctagacctctgggcactctacagccgggtcccatctcctcccactcttcaggcctcgctgacccgcgtcccttcttcgtcccggggctccaaccttgcccccgccacctccagaggccccacccacttatctgccctgcccagttctcctcccctttccaccaccccggcctctgcatccagccccgaggtcctgccccgcacgtctcctgtccccctttactcggccccacctgtggaccttcccacgtcctaacgggctcctgcccgccgccccgcctggaacctcgcccggcccgcggggctgggtttccgcggcaggtgcactgcacttcccgcggccgggcctccgcccaccttgtcccgcaggtcctggatggtcgtgtagtagtggctgtagtcgcgggagggcccaggcccctgcttctggtaccagtcgcggatcttcacctctagctcgccgttggccgcctccagggcgcgcaccttgtccaggtaggaggccaggcggtcgttgaggttctgcatggttagcttctcgttgcccgccagcagcccgtcggacgcggtcaggacgccgccgtagccgccgccgtaggcccccgaggaggacgaggacacaaagcgggcggaggacacggatacgccgcggccgccggagcccccgtgaatgctgggcgcgcgaaaggcgacccccggcccaaaacgcacggagccgccgcccaggcctccgaaggacgacgtggccgacgactggcgatagctgtaggaagtcatggcgaggcggagcacggacggagcaaccctggtctcagaagctgcgattcgcgggaggagcggcgaggccctcacctggcgccttttatgcccgcggccggtggaggggggaagggaggaatggtgtcaggggcggatatctgagccctgaggaatttgcaggctcctgagagcaaatatgggctctctccccattggtcaattccctcccctcccagagaccagaggcccctgccctccagaggtgccccgccccggtccgcgcagaagctccgacccgcactcccccactctctctctgcagaccctgttctggcctttcccccgtcagggacatacctggacacccctgtccctggaagccacattctgagcctcaccctttaagatcacccagagtttgacaccactgggaattacagtccctctggggtcatattcctacacacccctgacccagtgattttgtttttgtttttttggagacgagtctctgtcgcccagactggagtgcagtggtgtgatctcggcccactgcagcctccatctcccgggttcaagcgattctcctgcctcagcctccggagtagctgggattacaggcacgcgccaccacgcccagctaatttttgtatttttagtagagacagggtttcaccatgttgaccaggctggtctcaaactcctgacctcaagtgatccacccgcctgggccgcccaaagtgctgggattacaggcgtgagcccctgcgcccagccccagtgattaaccattcagagtgctccctgttaagagccccttgcttgcgatcctaaccagcccgccccccacaaagtgcattcacagattcctgccctccactggagattacagcctctcagaaccagcttcttgggaacacccatgcccaactccccttttgtcccctctgacaaaggcaccagttccggatcagggcacatccgggcattttgagctgcacgaacccagccctctcaagacaaagctgcctcaccctgctgtcgccattcagtgccccaggtgacaacagtctcctgagaacagctgcagggagcggttctggcagctgacacctttccaacactaagctccagcctgatcctcactctggaaccctcaaagcccactcgtccctggccaccaggatgatcccctcccttccatcccccaaagcatgcgttcattcaaccacaggagtattgggctgctttaatatttccaaaatgaggaagcagagcctgggagaggccagtaacttgcccatgaggcatttagcatctgccactgaaaggcaaacataggatgaatccctgccctccttgtcagagggctgctgaatgcatgtcctcatccttgtataaagatgagtgcttgaatgagctgggcagagcgacacaaagtgcccggcacaaggtaaaggttttgacaatagaggcagggccttcctccccacacagccccaccccttgctctgttcaacaattccacccaccgttttggatctctttggagggccatgccccctgccaggcactacagggcgctgcaacaacctcaccccagttcctgtccccagtgacccccgtccccagaactgtccccatggttccttcttgtccttatggcaaagcattcacccaggcttggaacagaggccctcctgagaaggtattaagggagacaggccagtccctgcccatctctgggtctcagttttccctcatgaaaagaggggtggcccagctcagccctcttctctgtgtattatcacctgggtcacctgtgactggtggagacttgtctccagcctcggaaacctaagttcccagcaaactacctgttagctgccaactcatccttgaactggggcaggaaaccccgtaaatacacacccctaacccaccaggaaccgctctgagccctcaggaaggccagtctgaggctgtttaactagtgaatcagttgcagaaagactgaaggtctttggagagcccaagagggagaaaggggagtccaagaccagccataaaagccagcaccctgtgactggtcagctctgagtcattcccttatcaggcactgatgaggaggcctgctccttgttagcgggaagggagattggccagatagttgccatgcacacaaagccccaataggcagctctgtttttctggcctgataggggggtctggggagggactttgtattaaagggcaaagaatagaatcaacagttccattcgtaagattaaggtgttctgagctccctaaccttcagaggcacttggagtcccagccccctactctaagaccataaacagaaggacagttgactacagggtagcacagtttagagccttttcagatctcactggatcctcacagcagcccagtggaaaaggtattcttatctccattttacagataaggaaacagaggcttggtgagaggcagtaatttgccaaaggtccaccgctaggagtatcagattctggcctccagcttcttgaccatcagccaagagtaacggaggccctgctctcccttccaaggaagtctcggcccccaaaacaactcctttgggtgccttccctcaaaatcttatcatgccagtgccaagggcagtcaaccccagactgaactgttggctgggctagggagaataccttgttccctctctctggccagaaacagtgcctggccatgaggtatgtggcctttggcactttctgattcatcaaggactcaggagaacagtctgtagaggctgccctacccagagatggaactggaggtcaagctgctgctcccatttaggaaacagtgctcacaaccaggaggctcccatcagcctctggcttcaggagggcagaacctggtcagaggagcatccatccaatgttcatgtctccagtctcaggtctggggtctgcagaagaggggtacagagggtcagaagtgatgggtatggaatggtgagctcaaaggaatcccagggaggatcctgcccagccttccccaactggattctacagaaccccagcactatgagatccctgcaggaaaaaagatccctgtcaaataagatcggaaactctgctctctctgactctcttttggagtttcacaaggcacagtaccagaagccctggaaacctcatttcctcatttgtaaaatagagatgatgatgatgaggaggaggaggaggatacctatttcagagggttgcttcaagtgataaatgtaatggtgcttgtaaaaggtttatcacacctggcaaatagcactcaaacagcattattattattattatataatgttatttttatatagtatttgttactataattttggctacaagtgttattatttaactttctttaaccagtatttcccaagtgcactggaccatggaatctttaaatatctattaataacccatgaattacagaaaaagccagtccagccccaggatgctcagaaaggtaaagtgactttcctggggtcgcatgatgattcaaccgactgaactgaggcagatctgggattcatttctaactcctaacactgaggctgaggccccctctgcctctccacttggacatacacatgaagcttcttatccttcagcagatgcaggtggttcccagagtggagaggttaaaggtaggggggttttcatcatcccaggagaaatgggatagtcattggagaccacaggaaagaagctgggggtgagagacctagtccttggatagaatggaatggtgtgataatgacaacaagaataatgatgaccaaggtgataataatacagtagataatcatagccaacatctactgggccaggctccatgctaaacactctgaatatattatctcaatgaatcatgttaattaagtattattgtccccatttaacagtcaagaaaattgaggctcaaaacggttaatatcttgtccaaggtcacacaagtaagtagtggactgggtatttgggccaaaatctttcactccctcaagccacagtcccaattgctaatgctgccctcctctcatgggaaagggatcaaggtgccttcttctgctgccctggagaaagagccaccaagttggggaaggcattgtatcatctgccaagatcccaacttgccctgcctgctctgatgcacaattatttgtttggtcagtcagtgggccattcaagcaagtttcctccaagttgagcctagcagaggagacagactcgtgtccatgagcaaagcagaaggctctgttcataatctggaggagaggaaaggtaaatgtgtggaaaacttcatgagcttgcatgtcctgtcaattagtagctccttacctgaacggcctccgcttccccagggaccaccagcacaaggaacttcctcacccgctcctccattcattcagtgaacatgcatcaagcgcagcttctgtgctacgcatgctgccaggggctggggcacagaagtaaatacaaatatttcctgcctctaagaggctgacaatctggtaggggggtgtatagaagtgtattagctttggtgaaatgtggtaggttcaatagctacatcaattttgactccttcctaaaaccctgctatgatatgacagttaaggagtattttaagagaatggaagaagaggtgaggcacagtggcacacgcctgtaatcccagcgctttggaaggccgaggcgggcagactgcttgagctcaagagtttgagactggcctagggaacatggcgaactcctgtctctaccaaaaatgcaaacaattagctgggcatggttgtgtgcacctgtagtaccagctacacaggacgctggggtgagaggatcacctgagcttgggaggtggaggctgtagtgagccaagattgcgtcactgcactccagcctgggtgacagagtaagacccagctggaagggaggaagaaaggaaggaaggaaggaaggaagggagggagggagggagggagggagggaggaagggagggaaggaggaggggagggaaagaaggagggaaggaggaaaggaaggagggagggtcaaagatgagaaatgtcaacaaaagctttaaagctcaaaaatggtaacacagaagatgagagaaagctgagacccagggtttgggggattaggaaggggtcaacagaggagagagcaggaagcccgtgagaggcaagcacattctcaacatactctaaagaagctcaagaattggggcaccacagacatggagaggaaaagtggaagagggaccgtaagcagggctggctggaagtttctgtcaacagtaccaggccccctcccagacccctacccaactaaggcagccaggggaccacctctccccaattcaggagaagacaggagatttacttttcctgattagactggcctgctcacaacgtttgatgatgtcaagtgtagagaagccatgagtaaatgaacctcctcaaacacattggtgggaggtgggttgtagtaaccactttgcagagcgatttgacaatgtcatcattttttttaacattcatgcacttcttgagccatcagttccactcttcgtgttcatccgaaagaaaccctggcccgtgtattgaggaagtcatataaaaggatgccctatgcagcattgtttgctacagtgcaaagacacaaacaatcactaatggcggggaggcgttcagtaactatgtaacatcctgctgtggaggactagaaattaaatggaatgagtaatgacaatgaatagtgacactgaaaaccctaaagaactagttattgggccggacatggtggctcacgcctgtaatcccagcactttgggaggccaaggtgggtggatcacctgaggtcaggagttcgagaccaccctggccaacatggtgaaaccccgtctccactaaaagtacaaaaattagccagtcgtggcggcgggtgcctgtaatctcagctactcgggaggctaaggcaggagaattgcttgaacccgggaggcagagcttgcagtgagctgagatcgagccattacactccagcctgggtgacaagagtgaaactccatctcaaaagaaaaaaaaaaaaaaactagttgttgggtacagtaaatctagttggagagcaacacacttaatatgataaattcatgtcaacatacattcaaaagatgacttattgctaaggtccatatgaatatgtatgaatatatgcataggtaaggaaggaatctgattgaaggatggtagccaataggaacctaagcttaatctctatggttttaagttttataagaatgtatttagtatttcttgttaattaaagtaaataatttcttaagtaacactaaaccacagacatttagaactagccaaatttcatatagtcaataccctcttcccctccctgcactcaccactgacatcattgtctctgctcatccacaccaaccctagccttgaattgagaaatgagagaggaagttttggaagagggagaactagatgtgaggagaaaagagaccctggaaagggtttccatcctcgtgcccccacccctgggtccgccaggctagttttacttctttatgaaacaagaaggcaaaacggacaagaagaactttggaagagtctgagtacagggagagctccttgcagccgatgacttacacctgaggaaagccctcccactctggttctccaaggatccatcgtctggaagcatctgaagttggcccccctgggtgttctcacaacagacaacaaggctctcccaggtggtggcgtggatctgtggggctacagctggtggcagagcagagggtattctatgcaagacagcagccaccttgtgggcacatgcgaggcattcccctggggactttctgaaataactggaagatctttagggggtgctggagtgggagccaccatgtgggccatcaggctagagctattgacccagtattgaggtatgcctcaaaccaatcaatgtgatcaagtatgtagacactgggaattatgtctgcctgggggcattgagagctatttaattacagaggcatgacccttgagcaagaagctgacagaccagtaggtatttctcaggcagaagagtaaagagaatgggggcctggaagagatgagtaaccgggcccagcttgggagactactggcaattcaatatggttgggccatggcaggaggggagggaagggggtcgttgaggacaaggtcagctgtgggggagctgtaagcaagacaatggaaagtcattttcatcagggatgggatgtgggttttgtgtggcaaatgggttgatgtgtcaagggaagcagggatgaccagggataaagaacccagtttagggtgttttaaaatagtccatgctagagatgagagggtctgaatctagccatagtggtgggctagagagtaaaggacagagacaagacctgctgttatgacctgatgacaaatgggagtgatgaaagagagggaccctgcacaaagcactgctgtgtgccagagatgctggccaagtcctggacggtctcagctgagcaagatccctgccactaccatcccccagccctgggacccatgccgtctcttggggagccttgctcttgcccagatggggaagaatcctattcactgtcttgaagggcccagcagccaggacagggcagcgccggccatgtcatgagcagcccaaagccgcactcgggtcaggaggctgatgctctcgggacttgagcctccgcacagcccaggtctggccatttctgctgcatctcaatggcttcctgagacgtggaaacccaggaaagggggagggcagggcaagtaagctaggtcaggatggcccctggtgttcctctccaagtcctcaggggaggaaaaaccagcccgaccagaaccagggcagatggtgtgggtggggagggacagctgagtcctgcaaggaatagtcccaggtccaggggccagcttccccgaggtgccacattccacagcctgggaagacaggggcctgcctcctcctcactccctctccctggaggtgagtacgtgagcaggctcacgctcactccacacagggaggcccccccaccgatcttagccaggggtgtctctctcagcttttgtcctgccctactcaatttgggcctcatttgacgcctctgccccacttcaagctgtggcccattccatctggactggggcaaggagagtgccagacacaggacagagagaaagaaaatgtccgggtgcctgcccggattcccagcacccaggagagggcacctgggtgcttccctgctgccttctggctgacaaacttccctcccatcaggatcctggtgggctgtggtggcgatgctgcctccttcaagaacagactctgggcagtcccagatgagcaagacccctccacaggcaaaatctttcctttcaaaacccatctgatcccacgactcctgaggggaagcttcagctctgtactccccctcacctgggaaggttcccgtccagaaactcaaattgtcctcctcggatgcaggggtcttggacactgcaagcattttcactgaacacccgctgtatgctggaggccacctccacccggcgttggccagagcatcctccctgcctacctgccccctccctttacctggatggcagccatgccagctcctctcagttccattggcatgggtttcttctccctgatatgtccaccctgacccgctcaggctgggtcagcattcccacccccacccacttgcccagcacttaccacagctctgtctccccatctagacttggagcttctgtatctagccccagggctgactccagcactagtaaacatttaatgattatttgccagaacagagccttctcctgaagcccttttattttttttcatttaacaccaattatggtccaccttctgtgtgccaggcaccttctagactctgggcttcaagagcagggcagtctaaagctgcctgccctcctggggctttcatctggggtagggggcagagtagcaaagccagggagggggtcagcagggaaggccattgaggggtggtcagggaaggcctctctgaggaggtgacacatgaacagagacctgaatgaggcaaaggagccctcagatccccagggaagattattccaagccaagggcacagcaaagccaaaatccctaaggaagagggagcttggtctgttcaggcaacaccaagaagtcccagtggttaagaggggtgagccagaatgacagtgtgcaggagatgagcccaggggaggccaggacagagcactcggtgtctgcggtctaatggaggcgctggcttttatcttgagagtaatggtgctttgagcagaggagcactgggacgccctccccacccctggctgctccctgtggaatagaccgtggggcccaaagagctggagatctaataagaggctctaatggagttcaggtgagagacactgggggcttgttctggggagacatcagaggacttcaggaacagtggcctggtgcaagggatatcccgagggcagagccagcaggtcaggctgacgattcatggggaggacaagggaaggagagaatcttgcatggctcctggttgaggtgtgagcctcctatttgcactgaggtcaggaagctggtctgggacggtggtttatctaatccacctccaggaaaggaatcacaccggggccctcctagatctgtgttggaacgcgtcctggcagaattaggttctactaaccaagcaatgactgtaccccgatctctgccagcgctgatgcctgctgagggaggggaaggacaagggctgtgtccacctgggccctgccttcacagacggagcccacagttaggggttggtatgaaagaggcgactttcttttttttttttttttttttcttttttttttttgagacagagtcttactccatcacccaagctggaatgcagtggcgcaatcttggctcagtgcaacttctgcctcttgggttcaagtgattctcctgcctcagcctcctgaatagctgggattacaggtgcctgccatcacacctggctaatttttatattgttagtagaggcagcgtttcaccatgttggccaggctggtctcaaactcctgacctcaagtgatccacccacctcagccttccaaactgctgggattactggcgtgagccactgcgcccagccaagagacagatgatttctaatgaagatctgtgttttctacattttcaaaaaagcagcagtgagcatgtctcacctctagcatgggttgaggggagtgcttattattttcaattctgactcattccaggctccactggctttaggctggcaagcggggccttgcagacttgggggaggggtggtcaggttagtgagtttctggaccaggtgagcagggggttggggcagaaggggcattcctaacagcagctggaaggagcttcagagctgctctggagacaggatgctgaggccctgctcatcccggctccaaccggctgcaggataaacattcatcaggcagaaaccacagagaatcacatagcgagatgggctgccaggagctgggaataccaggaatgcccaggcctggggactaagggggagatgagggagaacgggggagatcccctttgccccaaggaagagcagctgacgcctgatcccatgagaggggcctggtatctgaagcgctttttgaagtcagttgaaaaggaacactatcccacctcaaagacacacacacagagtattaacagaagacaaagcctcaccggctcccttaggcatctcacgtgcattccaggcaggaactacccagtgccagcatcagccctcagcaggctgcccaattaccagcccaaggcctaccagccgtgccagcaccagggaggcacgggggatgcaccaaggaaccacagtgccaggaagcatcttctgccctcccctggctcagtcctgccaagacccttccccctccagtggaatgtgctggagttggagaggaaagtgcttcctccaaagtccttgcctgggattagggctggagcctgtggggatgagaagatccaccagagatatctgtcctcgctgagtaaacatacaatgaggacctggtacacagaaaccgaacaaacacatcccaacagggatatccatgtctggggcttcagaagaaagggctggagcatggggagaagagaggaggcttcacgaaccccaagtttcccattcctgccatgtccatgttacctcatccttatcctcaccttgactgctaagaaacatagtaagcatcttcttggccgtgcacagtggctcacacctgtaatcccagcactttgggaggccaaggcaggtggatcacctgaggtcgggagttcaagaccagcctgaccaacatggcgaaaccccatctctactaaaactacaaaaattagctgggcatggtggtgagtgcctgtaatcccagctactagggaggctgaggcaggaagaattgcttgagcctgggaagcagagcttgcagtgagccgagatagagccactgcactccagcctgggcaacagagcaagactctgtctcaaaaaaaaaaagaaaaagaaaaagaaacataataagcatctaaaagcccagcaagatgatttagacaaaactcctacacttgtaggatgggggcatagaaatcttctagcccagagatcttcaagcctcgcctgctaagccctaagcagagaggtgggagctgagcggatctgctgtgaccacccacactcacacacacttacacacctcacacagtattcacacctactcacacatgcacacacatgcatacacatgctcacacatacactcacacactcccaggccttctcacacatgcattcacactggttttatatactcagctttctgtgagattttgcttcagcaaagattctccctcttttaaagcccaaacacgtgcttcagcctacctccagcagtttatataggtcagaaaactgagagagagtggggcctcagcctgcctaaagtcccacagctggtgtcctgctcagcagaaaccagcaggcaggtgccctggagccaggatgtctgtccccaggggacgacctgagctcggggaagagaaagaggtaaacactgtaggctcctgacaaaggcaggaggcaggccagggtcagaggagggacatagacccggggctgctggagctcagatggagggcaccctgagtgagggatcaaggcctgggtaagcagggagggcgccctggaggagggggcccttcacagccccagggtgagccacagtaaatggtgcctagagtaaggacatggaggtggcggatagtgggaagttccagtaaaaaagaaatcttataaaaacaggctaaatgtattggcctcttcctctatgcctaactctgttcgagtatgtggcatccatgaacttgtttaaatcatcgaagctcccctatgctgtggacactgtcatcactcccattttgccaactaggaaactgagagctacttgcttaagctgagtttggtaaggcaccgggctgggatttgaactcacaaggtctgggcctgcaccttgcggtctaaccactgtgtcaaaggaaaaccagggagcagaggctgcagagctggttcgaatcagacaacaaagggcctagcaggtcaagccactagatttgattttttatttttttcctgcagaagccaacagtgattgtttgagccaggagatgatacatgcaaagtaccaggtgagtcagacagcaggtttcctgaggctggaaacacagggctatcacccagctgggtcaacagccctgtcccagcaccccctcactccttccctctgctgccccaccatcatcgccttatcacctcaagaccaaaggaccacagccgcctcccccagagctgacctaccccggcaactcaccccagcaccaggctcatctgtctcaagccagctttgatcaaatccctgctcacaaattctcacagtcagcctgttctttacagcagcaactcgccatgtggtccttccacccccaggacagaacccatggagaggcgagccagggttactgaatcgagtctttgtggatgaacctgcacctttaataagtctgaatttttaataagttctccaggtgattctgaggctcactatagtgtgagaaccactagcctaacgcatgagatccatgagatatgggagaggcacaaagatggagggccccctgagtgagggagcgaggcccgggtaagctgaaagtgggtaagctgaaagcaagataaagtggctgaaagaagcctagccgtgggccgtttacctgctaacagaggaagtccacgttagcataactaaaaagtaacacacctagttttctgctttctgtctgggtgaccctgggcacaggtgatcaaagcctcacttggcacagctgccaaattgccaagaactgtaaaggtctaaaattttactctttttgcaagttaaaaagttgtcctgccatagttttatggatgctggcagaagacacgagaccctgggtcagagacaacgactttattactcatggcacagcaagaaacttgagctttatgttgcaaagagctgtgggttcaaatcccagctctgtgccttactaaactaagcttaagcaagtagccctccaccccaagtaccatgaggacaacacaaagcttgactcgagtggatgctacactacatatacaatgggttttgtatcacagctgaggagttccacacttgggggaaccaaattttttataatgggctgcaagaaaacctgtttgatctttgctccagagagaaatattgttattattatacagaacagtaaaaaaaaaaaaaaaaaaagctgcctcttttccagaggaagatgtcatctctgtcttccaaggaagtttactagcacatccttgaaaaggcagaccagaacaaaagctgtcagtgcctctgattgcaagatgtgcagaaatacaagagatccacagacaattgcctccccaaacaaatgggtgtatcaatattcatctctcttgaaggtaacaagttttaaatcagataatgtgagagaaagttcgtggaaaaatgaggacaattacaatataaggagataagaacatggaggcaaataactagagtgaaagtggaaagtaataaactgggaacctcttgcaacacaatttatggagacaataaagcaggaagatattctcaacccttatcaccgacccaaggttaatatctttaatatatataaagggctcctacaaataactaagtaagaaaccaagaaccctgcaggaaaaagggcaaagaatatgagcaaacagttcccagaaaaggagctacaagttgcatttagacttatgaaaacgttcaaccttacttgagaagagaaatgcaaatttagagtaccatgaaatcccatgatttacatgtcagattggtaaagataaaaaggtttgctggccgggcgctgtggctcacgcctgtaatcccagcacttcaggagaccaaggtgggcggatcaagaggtcaagagctcgagaccatcctggctaacagggtgaaaccctgtctctactaaaaatacaagaaataagccaggcgtggtggtgggtgcctgtagtcccagctacttgggaagctgaggcaggagaatggcgggaactcaggaggcggagcttgcagtaagccgagatggcaccactgcactccagcctgggtgacagagcaagactctgtctcaaaataaaataaagtaaaaaggtttgctaaattactatttgttgggaatatggggaactggacacaccacacattgctggtagtataaggtctatgaacagtcatttccaatatgtatcaaaatcttaagccaggtatggtggcatgcacctgtagtcccagctactcaggaggctgaggtgggaagattgcttgagtccaggagttcaaggctgcagttagctgagattgtgccactgcactccagcctgggaaacagagcaagaccctgtctcaaaaaaaaattttttttaatataattctttgacctatcaatttctttcacaggtgtttatctttcagacgtacttctgcacatgtgccaaatgacatgaagtactaggaggctcactgcagtattatttataatagcaaaagaccagaaatgcctaaatgttcattatatgatacatacaataaatacatatgataagtatgcaatagaatactgtgccaccatcaaaaagaatgagtcagctctgtatagtattgataggaaagatgttcaaagtattttattaaatgaaaatgtaagatggtacagtaatatagacagtttgctattatttttatgtgtgtgccagggaagaagatatgcacatctatgttggtaaatgcattgggttctttagaaggatacacaagcaagtgagatagcaggggatgcttctgggaacggagctgggagactgaattcaaagaacggagagactaatgttttgctgaatatcctttgtacttttaaaattttgtactgaattatatatctatcacttcttcccaaatatatatatatttatactgaattttgcatgtatttcttcttccaaaatgtatatatatataatgcatgtactacttcttcccaaatatatttatatatatataatatataatgcagaattatatattatatataatacataatatatataacatgtaataattatgtattacacattatataatatattacatgtaataattatgtattacacattatataatatatattacatatatttggaaagaatacatgcattatatatatatttgggaagaaataatacatgcataattcagtacaaaattatatatctgtaaaaaaacaaaacctaacttgggcattcagatctgccaagaagtttgaggtggtgctgggaccccaggcctgggccctgcaggagctcacagcctcagcctctctggatctactggctgccgatgggcactctgagcagtttcttgcttttcccaaagccatgcccaggaaacaccattcattccctcattcactcgtgtgctgtgcgtgggctctgagccaggccctatgccacatgcagaattcagagacgaaacagactcaggcccagcccccaacaagctcccagcagatgggagaggggagaatgggggagggaaagatctacacaaatagctacaaaagagaggcccagcagtatagcgtagcaggcaagattaatcagtgaccatgtagcaaggcagtgacaggcctggcctttgaaaagagccacgccttggggtgagagccactcattagccaggcccaggtattcacctccctaagctccagtttcctcccctataaaacatggaccataatcacaccagtgtggcatgtggtttagagcccaggccttggagccagggtggcctgggtttgattcacagagccaccattttatttcaaagccatgtcatgcaacggccgttacctcacctgtcagaacctcagtgtccccgcctctgaaatgaggctaataacaccaacctcagagggcttgtgggggaataaatgaaaaatcaggtgtgaagcacagtatctggcactccataaaatcaagagctattaccagcaacatgaaggttaaatggcatgtgtcagtcatcaccgcaggggacaaccactcagcaggtgtgggctgggaggagctttctgttctgttttttgggttttttgtttgttgagatggggtcttgctctgtcacccagggtagagtgcagtggcgcaatcctagctcattgcagcctcaaactcctgggctcaagtgatcctcctgcctcagcctcctcagtagctagggctacaaacatgcactaccatgcctgggccaattttttttttaagagacctgttcttgctatgttgcccaggctggtcttgaactcctgggcttaagcaatctgcctgcctcggcctcccaaagtgctgaggttacaggtatgagccaccatacctggccaggtatgggtttttataaaagattttgtgagaggataggcacagtggctcacacctataatctcagcactttgggaggtcgaggcaggtagactgcttgagtccaagagttcaagatcagcctaggtaacatctctacaaaaaatgatcagggcatggtggtatgtgcctgtagttccagctactcgggaggctgaggtggaaggattacctgagcccaggaggttgaggctgcagtgagccatgatcacaccactgcactccagcctgggtgacagagtgagaccttgtctcaaaaaaaaaaaaaaagatttttgtgggagtcgctcactgctccctgtgcggtggggtggagggaaggggaaagtgttcttccaaaaagctgagatttgaagaatgaggagtgggaagaaaagggctcgggtggtgggtgtttctggcacagggaaagctgtgggaaatggcctggccaggtgagacaatgcggggagttcagggagggagcagttcagtgtgttggaggcgtaacactgggagagttggaggcctggaggctggggaaggcaggggaggggacaagtgctgcctgcgggcctgttggcagtgggggtgtgggtggataagagacgggccaatggagggcctcacggaggggacaactgcgagggtccgactcaccatgcaggtcctgaataaagccgtgctgggcctggagaagtgtgggtcggggagggatggacactgaacagcaaggctcacctcacatccaggaggccccccgccagccccgccatgccacaggcactgacggttgccactaagcctcagaggccaactgcatttatttggaaatggagcaaggcactggccatgtccaggctggctttccagccctgtcccccaaaatcacagtcttcctgcaattactcacaggtgctggccaatagtgcttaggttctcaaatgcctgcttctactcaggctatcctatccacctgcagggtccttcccctcagccgtcacaggttgaaactgtgcctcttcaccattgcctggagtagacagaataatggccctccaaagatacgccaatcggaacctgtgagcatgtaccttccatggcagaaagagactttgcagatgtgattacattaaggatcttggaatgggggttgggttatcctggattatccgattgagtccaaagtaatcacaagggtccttgtaagagagaggcgagatggtcaaggtcacagagaggagctgggaccatggaagcagaggtcaaagtgaggcactttgaaggaggaagatcccacaagccaaggaaggcaggcagcccctggaggctggaagaggccaggagacagactctcccgtagagcccctagaaaaaaagcatttctgatgacaccttgattttagcccataaggcccatttcagatttctgacttccaggcctagaagatagtaagtttgtgttgttttaagccactgagtttgccaccacttgttacagcagcaacgtggaactcatacatcacctcttccttcaggcctttgtgatccctggcactcgctcttcctcctctgagcccctctggtgctttacctgaccctctcccaggcactgtcctcttcctatatgggtgagaattcattggctcttatcccctctaccagccagtgagctccttgaggctggggtctggctcatatttgtgcccccttgcccaaccactggttgggctgataattctccctggatccttagatctactctccaccttcctctgtcctgctctgtacctggaaggatgatccctgtgtcactggctcccttccctccaactgccccattggaatcagccatccatcagtaggcagcagcggaagatggagaacaggaagaaaggggcctgtgtatctatccccccacctctccttgcccagccacggttctggctgcagctgctcgctctaaggctcctgcagggcagccctcccctggccacaccccctcaaactcccttttcccatccctccgcttcccactgctctgctctgggctgtctgatccctgctgctcctgtccacacctccagaaatagttccctttctacactcggtcaaccctgagagtccgtcatattctgtggggcccctggtggatgcagatgtggctgatcatctacgtggacagccaggtgcaacacgcctggtagatgtgtgaacactgcttcggtctgtctgtcttagatgatggctggctgggaggggcactccccatccccagcacacaggcaggaagaagggcgttggcactgaccaggagaggctgtgagcaggacaaaaaagcagccagaccctcaccccgtctctccccacacagacccacatgctgacaggtcccaggacacatttctcctgcccaccctcacccctagggagctccgggcagcgcagaggctgggcaagtgggactggcagggtgccatgccttggtcccagagggctgcctcccttcctggtaggtctgtgcctggtgctgccaggcctggcccggcctccacactccttccccttcacaccacaatctgagctggcgagtgactcatcccaccatcctcctacgtgccccgtccctgactccaccaaacttggcctctcttggctccatctctgcactggctcacagcagcaaaagcatgtccacccccacgccctgcaccgcagactaaggcagctcactgcacctcaacgaggaagagccaggctctgacattcccagcttggatctccaaggaggtggctgtactgacacgtggacagagccccatggcccccacactgacacactggatcaggcaactctgctgtctcttgacatccatgatgtccactccttacaacaaccttccaagggttactgcccattttacagatgaggaaactgaggctcggggaggttacatgacatggcaggtggtagtggagctgactccaaaggctcctgccttcctctatagcatctccccctctaccctgagccaaactccgggaagccatgagttgtgtaggaaagggcttgggcactgacttggcggtccaaagccctgaggccaggctccgcctttcatcagctggctgacttcgggcaagccctcggcctctgtgaaactgttttccagtccataacaggaacagggatcctgccctgcccacctcaccgggcattcagaggctcagagagaagaagcagcgtctgcaaagtgaagtctggggaaggtggttgtggggtgcctcagcagcccgccaccggagcccggagagaggcggtgatgtccgctttggagccaacctcggctctggacagggcaggctgccggccacaaggccccgtctttgcaagctccccaggcggggtgcagcttcctttgtccctaggcggggtgcagcttcctttgtcctcagactgaacatctccctccgccaccggtgcgggaggagcccaggacctcgccaactcggcttcacagcgcctcctgggggccgcgaggggactcgccaacctgcctgcaggcgggctccctcctaccgcctccctctgcacccctgaccctgctcagtgctgtgtgagaggaacggtcagagggagcctgtctgggcaaaggcaggccccacactccaggctgctccctggcctccctacagcaacaaagggacgttgagctgagagcaatacaagagaaagagccctaggagggctggaagtccaaatgcctgcattctacctttgtggccctgggcatgtgtcttcccctctctgggccacaaaagagtggaggaggccacctctctaaggaaagagagctccccgcccagcgctaaaactgtggtttctctgacgctcaatttcctggcgtgtaacatggccacaaggggccgctgcagccacagctgtgaaggaaacagttcacaccgtgctatatcgttcatggatagttcatggggttttataggctcttgttcatttccataaagtcttccttggacttggcaaacttttcctctgaaaattccaaagtgtaaccaagaagggaaaggaagagaagagaaccaagagaagggaaaagaggattttatttggttcgtgtttggacctaagagaaaaccagaaagattgcccctgcggctgaggggagccacaatattggcgagagataggagaggcccctcagggagaagaaagcttggggaatgcagatctctctttaagattgatgactttcagtatcataaatcggtagagccagagagtcctcagccctcgccccattcctttatcagtcacgctcgcgcaagcactggcctctgcctctccttgcagaagtgacttgtttacatgttagtacagctagttcctgcctgactgaaccactgtcatctgagaattgagggtcaaagttggatcttcccagctcagaggagaagccttctctaaacaaaggaggggctcagctgggtaggttgttgcaaagagaactcacttcagagccaaggcagccaggccctgtcacttaaaagctatgtgaccttgtgcaagtcattgaacctgtctaagactcaggatactgagacagcaagaccttcctcaaattgccgaggtgagaattaatgaaatagtctgtctaacgtgcctgggacctaccagaagctcagccagtggagtcattaaattttgtctttattattagcaatacagttctcgtagcacacattgcaaaggatcgtgtacccagctcaggggcacaaggtgtgtgattgcgaggacatcagagaaaacaaggtgcgatgaactggcggtaggcatttgttgggacaatgacagggccctggcctgatcaagggaaggatcagggggagaaggagatactggggggctgggaggtggggatgaaggaggggcactgtccccacaactcctcatgctcggcttctgcagtcccgagtacagacccaagtctgtttctccttgtcccattctgcctaagggctggagcttctcagaaactctgacaggacatgtgtccatcttcagtggggaccctccccctcctagaagtcccccgtccagctggggaggacaggtcagggtgagggcagcagccacccagcagcctccatcagagatcatcagcatttcccaccatgaattcagcagcgcatctcgtggtcaaatccataggtgatttctgggttctgtagcctcctcttataaacttacaaagcactttaagcaaacaaaagctttggccaggtgcagtgacccacgcctgtagtcccagcaccttgggaggccaaggccaaaagctttgagaagtcctgcaaaaaaaaaaaaaaggtttggtttgtttatctccatgttttccactggatttgatcacaagagttttgtttggggttattttatattaattaacacccctgggaacatacactggaaaatccaggggcccaaagaactcaagatagggttccagttaagaactattatgttccagaccagcctggccaacatggtgaaaccccatatctactaaaaatacaaaaaattagccgtgtgtggtggcatgtgcctgtaatcccagctacttaggagactgaggtgggtggatcacctgaggtcaggagttcgagatcagcctggccaacatagtgaaacctcgtctctactaaaaatacaaaaaattagccaggtgtggtggcgggtgcctataatcccagctactcaggaggctgagacgggaggatcacttgaaccaggaggtcaaggctgcagtgagctgagatcgcaccactgcactctagcctgggtgacaaagcgagactccacctaaaatttaaaaaaaaaaaaaaaaactagtatgaagggaatgctctcaacgagcatcccctgccccaactttttgtacctcaaacatgactatttgctgtggattctgaatttgctttgtttcctttgtattttgcagttttccattagggctgacagaagttcctttgggaaaaccccagcatgtgttagtcatgccgaggggaatggagggaaggaactcgctttgttctcattttggcctgagaggagggagaacagtaggacccctggggcttgggggctggcatggcctgagatggatgtgagacccaggggcagagaaaatgctaagagctttttggaccatggattttccatgactcagaaagtcagtggagcccgccctccctggtgccctcgttccttcattgccactgcatttgttccacacactgaggagtctggtgaggaaactgaggcccagagacaagaaatacctgggacagagactcactgttcatgggtagctgcttgctttccaagaagacatttccagagctttcctgctcgtgggaggtgtctgtaattgttttagacagcatgaggtgaagagggtgggcttgcgggtcagacccactcagatcctttgtcagctgagttatgtcatttctctgagcctcagtttcccatctgggaagctgggggtagtgagaaataaggaagatgacttctgtacatgcttgccaccgtcccaggacagacgaggcccagctgccatacagaggaggtgacagcatggagcggggtcaggggtgcagaaggaggcgctaggaggaagggacaaatgaggatagaggctgttgtccatagagcacactccttggagggaggagggacccaactcagacacagctcactcaggtcaggggcaggagcctctgaggtgggtgggggggtgtgacgggctggtgggagctcgtaagcagggacatgcccctgccctggaggttactcagtggggctgggagtttcgcaggtggtgcttctcagtccagcgctgcttccgtgggttaggatgaagacccatcttcttgccttgtcctcctccacgaggggcttatccagaacaaaagctgttggcagttcctggccaacaggttctcctcctccactgcagggctagaaaaaggtgaaaacaaaagggacatgtgcttctctgtggctctcggggtacagttcagtctccccaccatgagcaagtcctccacgactgaccgcctactcccaccagcacctcgtcatccctcttcagcccctcctcaccctctgcacagtagccccaggaagttcaagttccagctcctccagtgggccactttcagtcacacctccaggccttcactgatgcagttccccctacccagaactgcccacccccaacacacacaaacacacacacacacacacacaaacacacatgcacaccacctccattgaatatcacctccaccaaatatcacctccaccaaatatcaaatatcaaatccaacatcttcctggtgtgttgacccaacactttctccaaagaatgttccctgcctcccaagactgtgttagttgtttctgctgtgtggcccagagtccctgggcttccccctaatggaatgcagcatactgtatggaggtggctgttacctgttggtctctccgacaagactctatgggggcagactctgcctgggtcactgtagtagccccagctactagccccatgcctggcacagagtaggccctcagtgattacccattgaatgaaggggtcaatgacaggcagagtctccacttggggctcccaatgagcagagaacttggggaagctaaccttcctccccacacacaccccacctttgaatctcaagcttgactcttatgggtttggtgttgattcacttccctgaggtttccctccatcttgacaaatgctccttctgacaaccccaacatgactgagtcatggtgagggcaagagatgaaaggaatcatgtttgagagtttggcctgagttcgggtgaggatggcatgtctctgaggctgagggtgctggtagcagcaaagacagactgagggattcccgggtgggaagaaagctcaggaatatcaaagccatcggaggacacatgagtgtcacacccagcatgtgggtgcagagccgtccttagggactgtctgtccttgcagggttattcacccaggacccctctgcacccacactctgcttctgatactcatgtgttctccgacagctttgatcttcctggggagagatcaaggtaactcttggagaaaattgaggccacagcgcaatcttaaaaagtgttaaaaattgttagaggccagataggtcgtgctaagagcaggaggtagggagccagatcaacactggtgtgggtgacttgggcaaggaacttttcttctctgagcctcagtttcctcatctgtaaatggaagcaacaagagcaacctcacacagttgtgagaaatcaacaaaatgacatatggaagcttcctggcccatgcctatcctaggaagcttccctagccaccatggccagctcaggagaccccatctgaaagtacagcccatccctctcatcaccgatggcactcactcagcactggcctgtctgcctgtctgcctctggcaccagactgtgagcccatgggggcagagaccttgtctgttctgctcacaattccatctattcccaatccctgccacagaataggcacccagtgaagatctgttgaatgaatgaatgaatgaatgaatgaatgaatgacttgaagaggggatgaaaatagacaggaactccaatacgagattttcaaaaacaggcaggtgaggacccaccaggccttacctctcctcacgatcttttaacttcttgtcgtactatttctcctgggttttattttgttgttgttgcatcatttcttgaactttctttctggtttcacaagaattccctcagacaatcccagtggatctcagtctagtaagaggaacagagaaaggaactgattttattcctgtttgggcctgagatggggagtgcttcagagcctgaagccaagaggctgcagcagcagcagcagcctccacaaccaagcaggacactccaaggggcggggactcgagatcaaagctctagagatttgggtagatatttgcggactgttagaatgatatgaataataatagagaccctcctctgtcatcctcctccctgcaccgtttgctcattcacccattccttcctttgacaagcacagacccagggccttctagggggaatctgagatcccaggaaagaatctacctgtgccaggtcactcgtcttattctcagctcttcatacagtcattgcttcccacgtaagccttttttctttcctttttttttcttttctttttctttttttttttttaatttagagacagtctcattctgttgccctggctggagtacagtggtatgatcatggttcacagcagcctcaaacttctgggctcaagtgatcctcccacctcagcctcccaagtaacccagtaattaggacaacaggtgcatgccaccatgcctgtccaatatttttttctttttttggtagatgcggggtcttgctctgttgcccaggctgatctcaaatttctggcttcaagtgatcctcctacctcagcctctcaaagtgctgggaatacagacatgagccgccacacccagcccacataaggtatttttgacaagcctctgcttatgggatttgctagcctctgtattcttttggggctcaataattgctcaaggccatagagaacaggaaacagagcaccagctttggagccaggccaaactggaattatatctttgcttgatcatttacaagctatgtgaccttggacaagttacttaacctctctaacttagaatttcctcatctataaaatgggcttcataatcccagtgtccttggatcagacttcctagattcagttcctgtctccactgcttaggagctgtgtgaccttttcagcaagtcatttaatctcgctaaaaatgtttcctcatgtgtaaaatgaaaacaaggacagcatcatgagattgctgtgaagattagatacagggtttattcccttatcttatataaaatgcttagcgaagtgcctggaacattattaagtgcgcaatcagtgttagtccttgctccttccttgtggacaattgttcttacacttagtcgcccagctcctttgtaaaggaattctccctctagtgtctgtgcctcctggctatagaagccagaaattagccttccagcctcccttgcagctggagcacagacacatgatcagtcacacacatcacagaagcctgtaagctgggagctaatgtcctaaaaaaggaggcacctggtggaatccatgctggaaggaataactgcagacctccagtttctagaagcagcagcgccacaagtttggtgatagcgccaagtggaatgggctactgaatctgcacctgcagatagtggcaagggtgggcttgctccgggctgtgctgccttcaaacctgttccctgcgagttcttcctggagagtctatggcttacctaacatcctttaacaaactggcttcagagtgtggcttctgatctttgcaggcaaaaaccctgatggctacagaatttagtaacaagtgtgattactggcatgagacttctaaaagatctccgtttgggtgtccaaaagacaatgtaaatttagcatgtctgaaactgactccccatctttcataccagccaacttccatcccacaactcctatcatccagttgctcagacaaaagactcagagacctccttgacttctttcttttacaatatgcagtccttcaagaactcctggcagtgctttcttcagatgatgctcagaatccagccacctctgaccgtcttcactctgagtgccaggggctcttcacctccctgcacactgggctctctgtttctgctcctagcctcgcagcctctcatcaagtggcctgtcactcctctgctcaaggcactgtgtgttaggatgatcatcagcactagctgctgtgcctggagtggtccccacacacgcttgactgcctccctcactccgtcaagttgatacagaagggctgggctcctggctaaaccctacccttaagcctggaacctcggccctaaaggaccccattttccccaaaaatgttacctttttggcctgcctgcccacatgctgtgcccataaaagacttcagctggcagagcaacacaagcggctgagcactgaggatataagcagctgagcggcgagcagaaaagcaactgagcatcggagactgtggatagatctggctaacttcagatggtgcagctttggagaggggccctgccggagacggtggggcttcagggaaagatcaccatcccatcacctttccatcctccctttccactgagagccacccaacacccagtaaagtattttgcattcgtcacctttcaaacagtttatgtgacctgattcttcttcctggacgccagacaagaacctgggtgccaagaaggcaggggctgccaccctgaacctccattgaactggttggtatttggccatcccctgacagcacagctgaaagaatagggacgctgctgcagggcccgaacagagcctgctcctgccagagaggagcaaccggctggttccagcgttcatttgctccggttcccacacttgctcacacactcactcccacaaggagtggccagcaacaggctgagtgaaacaaagtgctccttagctgggcgtgatggtgtgtgcctgtaatcccaacataagaaaccccatctctactaaaaatacaaaattagacgggcttggtggcccgtgcctgtaatcccagcgactcgggaggctgaggcaggagaatcacttgaacccgggagacggaggttgcagtgacctgaaatctcaccactgcactccagcctgggcaacagggcgagactcagtctcaaaaaaaaacaaaacaaaaacaaaaaacaaagtgctccagttcccgcccatgaagggcgtcagggcaactattccatcgcaaagtcattgcttatgttttaccttctcagtgaacccaaccttggccatcctatttaacattgctctcctccccaccctgccatagcactccaatctcccttgatattccctacttctttgcgcacttaccaccttcaagtatagtattatttatttctttattacatttgttgctcttgcccaacccttacctataatgcaagctctatagaggcagaaatctttgtctcttttgttcattgatatatcccaagcacctaggacagtgcctggcataaaaggagcttgatacatatttatccagtgaagtttgttgaatgaatgacatgagaatcactttggttatctggcctagatgggccagtgaaaatctggctatgattaaaatgagcttctagaagcccacagcatgtgaattaaattggagtgggcttgtttcttttaactgtactgaagagcttagagaaggagtaatacacttgaagttctaagttcctgattctgtagacagtcagaggaccagggactgtccacaattattctttaaaaatatctcatttcttgtagctacaatgctgaagtagttaataaactcaaaattgacttctccaagttgaaatcacaaccttgccaagtctcttatataaaagttagagcactgatcaggaaagagggacacccacagaattggaacaggaaggtattagagaatttaatagactccaaactccaaattatcttcacactctaccctaccacccttcattgctttcagaattataaataagccagatgccagcatacctgggggaagaggccaattacaaagacaaagcttagagaaaaagatttacacaccaggagaatttcaagctgctgctaacctgtatgagcagaaatgtgaagactgggattgggaatgaatttttgaaccagctcagttaatgtgcaagcattcaccagagactggaagttcagctactagcttaaatatctggaagtggatcagaatggttgctcagttggatgacagaaactgaactcaataaaggcttatttgaaataaagttatttctagaaaatcctttttgtaataaagaaaaaggaatctgactgcctagggagacaggaatgttggggtagaattattgcgtggaatccattcactcattcaccaactgtgagagcccagaagacactgtgcagactctggcttttaagaaatacgtggatcgggggaacacagcatctttgaaaaacacagttaacagttgttctctgaggatgtggatgaaatatgctgcagttgaattaggcctcctgatttgaatggagatgacatctcaggtacaacacggcaaaggtgaagagctggactaggataaaatctgtaggagtctgtgatggtgggtctctaggacaaaaatacatgagcagaccaccagtcagggttcagttttttggtttttggtttttggtttttggttttttgtttttgtttttttttttgagatggagtctcactctgtcgcccagactggagtgcaggggtgcaatctcagctcactgcaacctccgcgtcccaggttcaagcgattctcctgcctcagcctcccgagtagctgggattacaggcacccaccaccatgcccagctaatttttgaatttttagtagagatggggtttcaccatgttgaccagcctggtctcaaactcctgacctcaggtaatctgcccgccttggcctcctaaagtgtgggaatcatggacatgagccaccgtgcccggctagggttcagctttaagtaacagaaaccaatctcactttcttaacagaaataaatttaatacaaggcattaggtgcttgcaaaatcattagaaggctgaagaaacagactctatattgggcttctgggcatggcttccatattaacaccacagaagtggaccccaagggaactcttggtctgccacaatcagaaaacttgggaatcaggaagccactaccagacatgttggccccaggaccatacagtatacctggcagacctacacaaagaaaaagcatttaacttttccccctctacttctctctccactcaactcatgactcacagagtgcatctgattggaaaaacctaagctatggctgtaggggaatctggaaaagggtagattttagattaccagcctcttgagtataggaaagctcatcagaaggatgttgaaacagataggagtgagtcagtcttccatatctgccacattcactaccccgcccccacaaaagaaaactttaggtcagtaagagacctgtcttgagccccatgattccaattccaaaatcggaattggctcatagacccagagaactctgaatgaaggggaggctttgaggaagggccctgcagtaacatcacaagcatgcactatacgtccactgagagccaccctatgctcaataaaatcttctgcattcatcacctttcaaacagttcatgtgacctgattcttcctggacaccagacaagaacctgggtgtccagaaggcaggggttgccaccctgaccttcccataggaatctgtgggtatttacaagaatagctgactcctgagggaaggaaaatacccaggcctttagggatgattggacgctggctccaaaccaattctaatctctgaaaatgcagagcaatactgtggttccccagttagaatggaagctcatgtgagtgtaggttgtatctgtcatcttgtcactattcttttccagggagatctaaaaactacatttaccagcctcccttgccactaagatgagctgagcaatttaggttctactagtcagacgcacccatgtggacttggtttagaagggaagtaggtgaggaaatgaggttcacctgggacatccagcttactggtatggacagcagaagcagcgtggctctgcaactccagctgagtccagaattagtgcagaatggactcagaaggctccaatctgacttggtggtttcatggtcttggcagaggcaacaactcctttggcagatccactctgctttgtcatttggagggttctggaaaaatcaccctagattctgtttctccagccctcctaatgattctctaaggtatctagagctcttgaaaatcccttacttgttaaaataggcaaagtagtttctggtagttgcaattgagaatctaaccaatatagagatcagatgacaaatggagttttagcccaagtttgcttctcatgagcccagtggtatcccagaccaatcctgtggttatttcccagtgtctggagtggactagacatagtcagtaaaaggatcctgatccttaccagtaaggattacgtggtttagaaaaaggaccagcaacactacatctctaagggaatgacagagattagtgccacatgaaagatttgatgggccaggagtggtggctcatgcctgtaatccctgcactttggaagggcaagatggggagagaacacaggaatgtaagatcagccctggcaatagagtgagatccctgtctctagtttaaaaaaaaaaaaaaaaaaaaaaaaaacctcaaaaattagtctggcgtggtggcacacgcttgtagtcccagctacttgggagcctgaggtaggaggattgcttgaacctgggaggtcaaggcttcagtgaactgtgattgtaccactgcccaccggcctgggcaacagagagagaccctgtctcaaaaaaaaaatgataaatttagggttaacttgcctagtttttctgtgcagaacatgaacagatgttagagaatagccatgaattattttacaatttatcacatggttgttccaacagcagtcgttgatccagattgtgtcccttttctaaagcagatcaccattgaccctggcacctgctgtgggaaattcttttttctttatcccaataaacaaagagtaccagaataaatatgctttcacctgcagagaaagcaacacggtcattccccttatccatggtttcgctttccacagcttcagttacctgtggtcaactgtcatccaaaaatattaaatggaaaattccagaaataaacaatttgtcagttttgaagtgtgctgccctgaagagcatgatgaaatctcacactgccccactctgtccagcccaggacaggaatcatccctttgtccagctctccatgctctatgcaccacccacccactagtcgtcgcttagtagctgtctcagttgtcagatcaactgttgcagtattgccgtgcttgtgttcccttattttacttaattacgaccccaaagtgcaagagcagtgatgctgataattcagatttgccaaagggaagccacaaagtgcttttttttttttcttaaaaggagttttgctcttgtttcccaggctggagcacaatggcgtgatctcggtttacctcaacctctgcctcccgggttcaagcgattctcctgcctcagcctcccaagtacctgagattacaggcatgcgccaccatgcctggctaattttgtatttttggaagagacagtgtttctccatactggtcaggctggtctcaaactcctgacctcaggtgatcctccagccttggcctcccaaagtgctgggatcacaggcatgagccaccgcgcccagccagcaaaatgctttctttaagagaaaagatgacagttcaaaacttactacggaaagaaaaaaaccatacgctgaggttgctaagatctacagtatgataagatattttgaaagagagagaccacattcaaataatttttattacagtatattgttataacgattctattttattagttattgttgttaatctcttggtctgcctaatttataaagtaaactgtatcttaagtatgaatgtgtaggaaaaagcatagtgtagatagatttaggtgctatccacagttttgggcatccagtcaggatctttgaatgtattccctgtgaaataatgagcaactactgggcatcttttccaggatgtgcagagaatcaaacttggagggtatgcaaacagaaaaattccccaaatcacactcaaggattgctctaggaacacaccactgctgtcacttctggccaccaaaattgaagctcaaactatggatgatgggcactgcatgtctttgccagagccgctgctattgcttcctcaaaaaatcacatatctctgcccaaccttgttcctgccataaaaaattccactcagcacctcctttaaatcaaaatcaaagtccttcactccaatggggtgccatggttaaaaaaaaaaaaaaaacgtcttgtgcgggcgcacctgagtggcagggctgtcaggggcccatgccctagatgcaggtgagctcggaaaagcaagtttctgacctctcccttggggagcttcacacttaaggtggagaatttcccaaattgaggtagagaaaagatacataaaatgggccaggccttgtggctcacacctgtaatcccagcactttgggaggccgaggcaagtggatcacctgagatcaagagttcaagaccagtctggccaacatggtgaaacccccgtctttactaaaaatacaaaaattagctcagcgtggtggcaggtgcctgtagttccagctactcaggagactgaggcagaaaatcgcttgaacccgggaggtagaggttggattgagctgagatcgtgccactgcatttcagcctggacgacagagtgagactccgtctcaaaaaataataataataataaataaaataaataaaaagatatgtaaaatggtagatgaggaagacagcaggtagcagaaaaagaaccagagaagagtaaacagttgcatattaacagcggagcgctagaaaagagatcacagactctcactgctcaggtgtcttgctagagccacctttgacccagagacactgatgacctgcctgctcccatatccacaaattccaggatcttgaatccccctgggtttctgtgtcacttcattccctaagtgtactcttacataacccctctgccagtgatttgagccagcctgtggcaatttgtgttttccaaaaatgaccacatcaatatatcccattgcatatgctgttcttcaacgtgacatggacacacctccatctagagacggggtctgtatttgctttctatttctgcttaacaaattactgcaaactcagcagcttaaaatagcacccatgtattagctgacagttccacaggcgtaattggattctctctgcaggatatcacaagggtgaaatcaagatgtcagccaggctaagctctcatctgaattctcatctgggggtaatctgcttccaaattcttctttgatcttggaaaacttcaggtctttgcagctggaggactgcaatctcctttttcttgctggctctcagctcctagagcccatccacattccttgttccatgaccccctttcatcttcaaccagcaagggcacattgaaatcttcccagacttcaaatctctgacttctgtgaccagccaggcaaaactcttggattttaaagggttcatgtgatgaaatcaggtctgccagataatctccctctcttaaagtcaacacatttcagaacttaattaccaaaatcccttcacagtagcacctaggttagtgtttgattgaataaccggaagaagatatgtgtacagcagggccagaaatcttgggaaagtatctcagaattctgcctaccacaggtctattccctttcccttgaatctaggcaggcctgtgactacagaagaagtggcactgtgtgacttccccttccaggtgataaagtcaaacagcctctttctggcggtttttcacttgggacatgtgtcttgggagccctgagccagcatataagaagtcgggctaccctgaagctaccgtgctggagggatcacattgagactctccatagagatagagagagatgtccaaggagccccagcgagcccaggtatgtaagtgactaagacttcaaatgactccagcccccagcctgtaagcagcaatgaaaccaagaggagcagagacaagcagtccccaccaagccctgtcaaaattgcagattcatgagcaaaatgaattttgtcattttaagcctctatactttggggtagcttaataagcagctatagtgtctggtacataggctgaggggggctatttgtccctagtaataaaaaggatttttgactatcagaatctttagagaatattgttggctgatgtcttgtggaatgtcccttactttgccttgaaggactttatattttttatattttttacttgaaatcttgcaagcaaagaccacatcatttttgtcttgttttcctccatagctaacacacaacgtgacaatagactatggtagattgtttgcaaaaaattgcttcagttattgccctccctatatccatgcccattgccatgtgactttgcagttcctcccctcaagagaagtctatttcccctgctcttgaatctgggctaggttgcgacttgcttggccaatataatacagccaaagtgacttctctgaacctaaacctcaagatgccttgcatgtttctgctcatgaccttggaacacatgcacaagctagttggctggaggatgggagtcacagaccccattcatcctcatcaccccagccagcatccagccaactaccagaggaagagccacctggctgacttgcagcgaaccatagatgcataaagggaaccagagcttcccagactaaactgcaaaactgttaagctaaatgaatggttgttattttcagccactaaatgtgggttcctttgttacaagcaaaagttaactaatagaaaagtgaacccacactctttataacagattgattatccctttactctgtcaccaaggatggaatgcaatgatgcaatcatagctcactgaagcctccaactcctgggcccaagcaatcctcccacctcagtctcttgagtagctgggaccacaggtgcctgcaaccatgcctgtctaatttttgttttgttttgtttttagttttttgtaaagacaggtctcactatgttgctcaagctagtcttgaactcctggcctcaagtgatcctcctgtctcagcctcccaaagtgctaggattacaaacatgagctactgtgtcccacccaccctatcccttcttaatcccaaagaacaaatgggtcaaagtctgagtttgatttgcagtagggaagctttattatagtcaagatcgtgcagggtgtgagagcaccccaggccagagagaggaaagaggtctgtctccccaaccctgaaggcatcaaagccaagcagggttggaagccaatggaaagccagaggcacatatgccaagtcagttcagtcccaaacgggcacaggggcttgttgccagctattcctgatgtcaggatccaataagcaggcttcatcgggagtctgcccatctggggatgctcagctggggctgggcaggagaagtttacagaggctctagtatcgcgaaaggaagcctgtggagagatggaagggagatgagggggagaagggaggactgtaagcaggagcagagaggttgggacttgggggaagatggggaaactcgaagcaaggacactagagctcaaagagctggacaatcctgaggtagaaggaccctggggtctcccaatctactggtccccatctaattcctgaatctctgttgcagcaaacctgacagatgcacccccaagtctgaggatggggggcttatgaggcagccccctccattcaacagatttgttagtcaattttttggatattgaggcaaaagatggccccagcctcactcctagatgtatatccatggacctgcagtgccactggactcacaaaaccacattagacaccctgcagggcagctcccaagcacctcaagtcttctctgagctaaacattcccagttatattacccaggcttttcctataatttcatattacatttttattttataaaattcaatgtgtacatgggaaaatgttccctgatctagagaccaactcacctgtgtgagcctttcttacatttagattatgttcatccttttggcagttgcatcatgtaatacttgtgcaagccaaccactgactaaaatccctgagtctcttttccacctgaactgttgctgatccaggtcccccatcctcatgaaggttgaaagtactggctgtgaagccccacagagctgaacccttcatttgtgattgtatgactttgagcaaattattttctctgaacctcattttccttaaaatggggattataataaaacctacctcatagcgtgtgtcatgataatgcacaattttcaacccatctcctacactactgagactcagccatgtgtagatttggtcctagcctcatcctaggctctgtcaaaaataatgatcaattcagaaccaagggtaggtctctgacacctcactagagatttccctaacatctagctctattcagaatctgtgttccccagagattcaaaaatactcaaaaaaaaaaaaaggtgagaccttgactctccaccccacaacctaggattgtcccttaccttttgtctcatcttggtcaccagattttgaggaagaagactaggaatgggatgattttccgcttcctcctccgtagccgccaccacttccactcgcttcttcaccgcctccgtagctgcctccactttcacctccaaaaccacttcctccaccatggctgcctccacttcctcccctggacccacttcctccaccatagccacccccacttcctcctccagagccacttcctcctccatagttgcccccacttcctccactatgaccacctccacttcctccgctatggccacctccacttcctccaccatagccacctccactacctcctccagaaccacttcctccaccgtagctgcctccacttcctcccctggacccacttcctccaccatagccacctccacttcctcctccaccatagctgcctccacttcctcccctggatcctcttccataactgcctccacttcctcctcgacctccaaggccaatttttccagctccggaggattcactaagaaagaaagaaaacaagagagttaaaatgagcggcccccatacacatatatgaggatggacctggacagagtcaggacccaaacatgaatctttctgttttccttcctgggaggcagaggacagagtctgggcgggcaccacagctgggagaggagagcctccagctgagactgtggagccctcccctccctggagcagggaggcagcccgttctctcagtgtcaccatcctcctttcccaaagcccaaatgcactgaggtccccccggcccccaggatgaagaagtcctcaacccataagaccctgtgtataagaacttcccccagctgcctctatccagagggacagaagtagtatcagaggcctagggacccccaggggttccaccaaatcctgggggacctacaagtcttcctggcctccctcaaggaggttgtggtaggtctcgatttccttctccagccgcatcttaatgctgagcagaaggctgtattcctgattctggcactcgatctcttgccggacgtcagtgatctgggcctccaagttactgatctgctcctggatcatctgcagctggccacagtagcggttcttcgtgtcttccaagctcttctccagagctgctttctaagggttaggagaaggctttaagagggatgctacatcataactcctcttcttcccactcctgggctgcaaagacttcctgtgccccaccttggcaaagggtctatagcagaactaccaaccttgctgagctgagactgcagctcaatctccaactcctggacaccgtgccggagctgggtcacctccttggcactggactgcacctcctgaccactactggatacctcatgctcgatctgggttatctgcaaaaccaaaggctcagtaagcatcaggctgtgccaggagcttcagtgagtgagattctgccccattcaccaggatcttcacctccagggccaaggctgatctgaagccaatgacaagtcattctgagttctgggtaccctccagccatggagggttgtccagtcctctcaacatgacattccctctcaacaaagttgcaagacccttcacgctttgtctcacaaccatctttctaatctaaccttattccaaacttcccccacctttcaaacatacacacacacacacacacacacacacacacacacacacacacacagcacagaccatgccttcatgtatgtgccagactctggctgggcactggagactcaaggacgaagggaaccaccaaggagctcagtacagtatgggagacacactgtatccctctgctatagtcttacattacatagcattagattaaattgttcacattctgcttttgttcacacacatctaataaactgtgagcttctcaagggcagcagtcttgtttggctcatatcagacatcaatacctctgagacatcaatactttacatataacatggcactgagaagctactttgtaatgatgtttgtatgcagtgaatgaagatggatgaatgacttccattggaagatggataaatgacagctgcactgagagatgcagagataggaggatgaaggaatgggaggtgggagggatggagataggaatagatggaggggaggaggatgaatgggcagcccactctgctcacctgagtctcatattgattctcgatgtcctttctgttcttagcaatgagctgctcatactcctgacgcatgtcattgagggtcttggtgagatctttgccaggagcaacgtttatctccacattgacatctccactgttctgcccagtcagctgactcatctcctgccagggaagaaggggagatgaggtcacggataaagtcctctgcaccacctttcagaattctccctctggtccccccagggtacaaaaaggggacacagttgtgaagccaaagcccaaccactaccataggtgatgccaaggagaagttgaaagtgtcctcaagagcaaaggagagggtgtctcccaggtaatgttccaaagctcccctgctgtctctgcatttctgctcctccctcttcccggtaagccataagccccagcaacctacctccttatgattcttcttgagggccatcagctcctcctgcagagtctcatactgcatctccaggtcagacttctccatggtcagattgtccagcacctgccgcaggccattgatgtcagcatccactccttgccgcaggttttgctccatctcaaacctgcagaccagccagggttagaaaacaatcaagagggaaccaggccctaccaggacctccagagcactgaggttcaggggtaagggctgatgacaggagaggagaagaggagcaggactcactttatcctgaagtcatccagtgtcatgcgagtgttgtcaatgtccaggagagttttgttgttgcccactgtcaggtccacaatctgaaaaaaaaaggacacagccatgatatcatgctgtggaccactgctgagagggcaagaggccaggcaaagccacaggaggtgaggattccatccaggaagattctcaagaggaatgaggaacttccaacagctgggacatggcacagaccccttccagccttcagcgaagatgtttggtgtggccttcattcattcattcaacaaatatttgaagatctactgcaaagggcattgtaggatttagagattactgacatcctgttcctcagggagcccaccattgactacaaagtcaaaagtgtcctaaaagagttcaaggaaaggagaggtggcttatggcaatgggagatcaagaaagacttcaggaaggaggtggctggcaattgaattgggccctgaaggatggctaagatgtaacattaataaataaatggaagaggtttagagtagaagaaacagcacattcagagacatgcaggagttaaaacaagaggaatcactgagaatactgaagagccagaccgtgagctccaccagaactaggtctagcacatcactatgtctacccagagcaaccctgagggtaggcactcactgaactgagtggctgaataaatggatagatagatagacatgtgggtggagggaggaagggatagatggaaggatggatggatagatagcttccattcccagatttctggatcctctccaacacttgaataaccaacatgtacagtcaggtccaaaataccttaaaagatcaagatacactcctaaagaagcccaggagaagtacaaaggaagagaaagtattgacttagaccaaacctaaaggaggttccacatccagtcccagctcagctcacgttaacccaggtctcctctctgctctgcccaaactctgaaagttgaggaaatggaagtgaacactcagagcacaggccaaagtcctatcctgggatccccagaaaccaaacacaagtttgtttctgatgaaagcgtacatttccaaaaggtggattccctggctattatctgagcttagagtttagcattttaacttttttggaagataaagaatgaaagagaaagagaccaagacagagacagtttcctgcacctacctggtccttgagatcatcaatagtgttataataaggggagtagttcttctggatagcagcaggtcccttcttgtcgtaccaatcctggatcttattctccaggtcgttgttggcctcctctagagcctgcaccttatccaagtaagaggccagccgagaattgagttcctgcatggtgctcttctcattagcagtcagaataccaccatcacctcctccagcaccacctccaaagcccccaaaccccccaaacccactcccatagccaccaccaaagccacctccagaaccaccaccaaagccacctccaaaacccccagaactactatagcctcctccagaagcaccaccaaaacctctggaaccacccccaaagccaccgcctaaactactggcactaaaaccacccccagatcctccgccgtagctgtagccaaaactgccaccgcctcccctcccacagacacgagagcttcccccaccatagccactagaagagctgaatcggccccctcctccaccgccccctgaggagctgaagcggctgtaggaagaccttatgctgcccccgctgcccaggccgcccccgccacccccgccgctgcggctcaagtaggacgaggagaactgtctgcagctcatgacacagctggtagctcacgggttgagaagcagtgataggagtgctaccggctcccaagtgcagggtacagagctgtccctggggctgcctacttatacccccagctgaaggtggcacgcctgggtgtgcccttgttctgtgccagcctccccccacagacccgagggaggtctgggatacggaggcagccgggctgccccaggctcagcgtcctttggtgactgcctgggggcggcccagcctctctccattgtgtgggataatttgatgacattaggctgtcagggccaccataaatcagctgtactgccacaggggtgacctagatcctggagtctggtctctggctggccccaacagcaggtctgagacttagccccttcgggatagaaactcccaagagcagagtcacctcctctattgatggtcattactgtctgcatccctcatgcctccttgctcccaccttgtgcccactgtgagctgagctggaactagggtactaaggagttatcatagaggagggggaggcacagcccctgcccttgtggagccccaaatggatgaaaaccaatccttgctctcaggatcctcgaggctttctgcagagtctgaggctctgcccttgggagactccagtttgatgaggaggcaactggcatggccaaaagatggagacgggcaccgagaccatgcccgccagcactaaaggacagcgtgcagagttcacacaaagggctggaagaagaaagtggaccaaataaacaaggtggtgctgacactagctgacctctgagcaggaatgcaagtggctcgactgtcctggtccttttgcagggcccagcagggagtgtggaattgaccttggttgagtgcctaccccatacagaactctggaggggatacagagatgtgtgacttatccctgctcctggcagaaacttggatgtatattctggtcaccaaggccagaagagaatggtaaagaacacgctggtctccggtgtgcctacctgagctccatccagctccatgctcatgagctgtgtgactttgataagttacttaaatactctgtgcctcagtttcctcctttgaaaaaggttgatatgagtagtttgtccatctcctagtaagagacttgtgagaagtgctcaaaaaatgttcggctgcctctgatcattcagccccctaactccccgtcaactctgccctcacccagaccttagccatgagcttctaactgccctccctgcctctcccattccctctgactcttcctgcacagcagccagaatgacctttctaatccatgtctgacaacatcacttcaccagtttccctccaccctcaagataaggtccacattcctggcacttaggcccatccccatctttccattcctgccccatctcccaccatcccccaggccccctagaaaatcatacaatgcttcccaaatgcccttcttccctctaagaatactcggcacttgcagtgacctctgattgaaatgtcccactccatcttttctacacagaaaactacccatcttcagtgatccctctgactgcctcctcctctgtcttcctgtactctcgccccctgggtttgtactgtgctctgttatagtgtctcacacttatctccatggctctatgaagcacttgatgaagaataaaagttcatgtactgaaaaaatagaagaaacctctctctgcgggcagccagagctcctctaagcctgcccctgctcatctcgtacttgccccagtgcccagcgccacgtctgatccaagtaggatcccaacacatatgagatggaggaaagataccagtcattccagaaagatgctcattgctgaaaaggagctaaaggtaaggaaatctctttgccaggatggtcagcaagggcctgaaagaggcaatgcctgcatgtgtaggcggcatagatgactggtatttcttgaggggcttttaagtgatgctcaacgactgttaaataatactgaagtggccggacacggtgacccatgcccgtaatcccagcactttgggaagccgaggtgggcagattgcctgagctcaggagtttgagatcaggctgggcaacatggcaaagccccgtctctactaaaaatacaaaaaattagccaggcgtggtggcacacacctgtaatcccagctactcaggaggttgaggcatgagaacaacttgagcccaggaggcacaagttgcagtgaggtgagatctgcgccactgtgctccagcctgggcgacagagcaagactccgtctcaaataataataatcatcctaaacataataatactgaagcacttggaggaagatttcctttttccatgtttgtttgtttgtttgttttgagacagagtctcactctgtcatccaagctggaatgcagtggcatgatcacagctcactgcagccttgacctcctgggctcaagccatcctccagcctcagcctcccaagtaggtgggactacaggcacacaccaccatgctcagctaattttttttttcataaacatgagatttcgctatgttgcccaggctgatcttgaactcctgggctcaaatgatcctcctatctcagcctccaaagtgctgggattacaggcatgagccactgcacctggcctctttttctatttttcaatcttctgattagtcaaggatgaaatctcatttggacactatggcttctctaacgacccacacacttgtcaatcaccctgttcaaaaaaagagagccaactttgggctcagaacctttagaaagtaacagcatctagttagaagttaagtatttctgtatgtcatttccttctgcttctggcaagtgattatgattttccttttttgtagtaatgtaagatttcctttataaatatatttattgaaatgaaaggtgagttaatttaccaaaatgtgttaaataaatatttaaatgggtgttacagaatatgttacattaaaaattaaacaggtagtttaagttttgaaaattaaaagagaatataattctcttttattcaatattcagagaatactgaaggcattttatgatagttaatacatggaagactcttagatcaaggctagtgggtataattgattccctttctactttctcaaatggttttaaaccattcaaggtttttgccaagctctgctgggaagcccagaatctgccgcaatgtgttccaaggcctggaaagttaccctcttccccatgcccatgctgatgccgccactctggttgggatgtaagccccaggtcctgggtccctgagctgggtagggaagtcagtggtgctgtggatgggccaccctggagagagccagcagagtggcactttcagaaccctgctctgtcatctgcaaatgtatctgtttgggggatcctaagaacagctgagacccacctgactgagcagaagctcccagctggggctcccctggccagctaagcctcttgacagatggccctggtttccagccctggtgccaaaccccaacccctgtcctcacccaccttctccacttcccaccctccagccctgtcttaagcctcactcagcccgaagcagcaggcttcgtccctcagaactcctcccagctgccagggaaagaaagctgtgcatgaggaccactgtggggtggacagcacagtagctccccagccaggcaaggctgggccacgtgccagtttcaccctccctttccctgtggtcctcaaagttggcctcagtttcctcatgagaagccccttcatgcactgttgccaagggccataaagacagagggcttccacctgtaatcccagcactttgggaggctgaggtgggcagatcacgaggtcaggagatcaagaccatcctggctaacacggtgaaaccctgtctctactaaaaatacaaaaaattagctgggtgtggtggcaggcgcctgtagtcccagctacttgggaagctgaggcaggagaatggcgtgaacccgggaggcagaggttgcaatgagcagagatcacgccactgcactccagccactgcactccagggtgacagagcgagactctgtctcaaaaaaaaaagaaagagggctccctagatgaatgcccaactgctgcccacatgtagcccctgccacattggccctcctccccctacatctggccttgttccaatacaaagaggatcttgctgtgcttgcagctcctgcggtccagataggaggtcttgttccagctgcagcagggcagcatctcttcccttctcccaagctctctgcctggcatgggaaccagactgggcaagatggggccagggatgaggaaggccaacagccatggcctgagtgagtgatttcttctaggtcatgtggcatggctcactcttccagcctctcagggctcagggtctgccctctgagccccaccttcaacacctcccatgggaatcctccaaagaatgaaccaggaatggaaaccatggagcccatggcaccccggcacctgagacccagcgagaatcaacactgcctctctacagccagtgtgcaaggctgcaaggctgcaagctagacccagtgccagcaacccaaatgcaggccctccccttggggagtggatggagtaggagagaaggggctgcaaggacccagagaggcagacagagggacagagagagaaccaaagatcccacttgcaaggtgtccccagaggcaaaggtatcgtccactggggacatagggacctggagacagctcaaggacagctttgctctggttgtgggagccctcttgcttgcctgcaagcagcctcccacacccccaacttactacccattgctgtctgtcattgatccccaggtggggccagggagggacctgagtcagcatgtagctggctgctgggagagggagcacccgctgagtcacggctcctcccctggagcctccatgagccatctaggcaggtgtgcactgcccactggcgcagggctgtgggtacctgcacctgtctgtcaacactgattctttctcatacaacaggcacttgccatcacccttcccaattcagaccctatcagaccacagtgaggggatggagtgggcccacatacgtgcctccacctgagtctaggcaccccaggcttgtgtctgctgggacacacctagcagtgaggatgagagcaccggcttcgaagccaggcaggtcatggtgtaaagccagattcttccacttatttggggaaagttgcttcccctctgtgaacctgtttcctcattccaaattcggattcatcctttattgagcacctactatgtgccaggcattgggctgagtgctgggggtaaagtaatgagcaagcccttatcttgatggacagttatgggataaaatagacctgcagaaatgaacatgtaattcacaactgaggtgagcacggttggtggggaatggagagcacataataaaggtgtggcatggtctggggtaccagtgaccttctccctgagaaagagacacttgagtgaagggggaggagaagtgagccaggagaaggacaaaggggaggggcatacagcatgtgcaaatgtcctgaggtgggaacaagcaaagtgactgccagggcaggagtcctgtgtggctaaagggcagtgggttaagtcaagcaaaagatttcagtggggaaaaaaaaatagttctgagcttggccagccacagtggctcacacctgtaatcccagcactttggaaagccaaggcggtcggatcacctgaggtcaggagttcaagactagcctggccaacatggtgaaaccctgtctctactaaaaatacaaaaatcagctgggcgtggtggcgggcacctgtaatcccagctacttgggaggctgaggcaggagaatcgctggaacctgggaggttgaggttgtagtgagcccagatcacaccactgcactccagcctgggtgacagagtgagacttggtctcaaagaaacaaacaaaaaaaaaaagttctggcctcatgaagttgttgtgaggcttaaaagaactcatattgtaaaactgctggtgtgggtctggtacatggtgggacatcatcctgactgtcggtggcactgtgcctgctcccaacttccccatggaccatctgggcaacttgggttctcagctcccttgcttattattagcccatccttctggcctattgagcccccattaggatcaaagacctgtgcctgtggggcctggggaggacattgaatgtttggaggatcatagttccttccgtcaaggaacctccagtgttgcaggcaagaccctcgttgctttgcctgcactgtcgaatttaatcttcaccaactgttttaggaggtatgcattaatttttaaatcattttacaggtaaggaaattgaggctcagagagggtatcttggccacagtcacagagctaaacaaggcagaatggagccagggcttgccctccagtgatcaggagctacagtggacacaggctcagagctcctgctctctgtcccaaaccccacacatgcactgggtccctctctaccttcttcctcatgttgtctcttttcttattcagtctgtctcaattcaccccatctcccctacacctacaacagttaagtttcgataagtatgtgtgaatgaatgaatgaatgaatgaatgaatgcccctccctgcctagtactggcccagggccctcactatcctctctatccctgactctgtctctctgactctctccctctccctttctctctctctctcaactctatatccatttgtttctctctatttctgtgtgtctatttttgccctctctctcaagccaagtcacccctaaagttcatcagagcaccttaaaggaaaaagacttcctttcccaagcctggccttacagtggcacagagggaagccctgtcaggaaagcctgtgctcagcaaacggcaatggaggaggagctggtgactgccctgcacttgcctgaggccggtccatcgccctggaagtccctggcatcccctggtcccctttgtggcagcctccaagctcagtgaggtgggccagggaaattcctggggtcccacaaggacatcgggaccccccagcccctggggatcaggcctccttggggctgcctcctctgacatcttcctgtaggaatagtcgcctacattacccaagccaggttgtctgtggctttggggaagtgccatttgcctgattaggaaggtacatatgccagttgctgcctatagagttccctggacacattagagatcttttcaccattaaaaaaaaaaaaaaaaaaaagctcccaaaaataaaggggattgagaatttcaaggtcggttccaccccataaaacaaaaaccatggagtaagctacgaaaaatgcacactgatcccataagtctctcagttttatctcatccctgagaaagaacggaacaggaatgaagccacccaggacgtggcaaagcctgagcatggacaggactttgccactttcagccttaggacctggagcaagccagtctccctacggtgaggttggaggagtcttcccggtggctcacctaggactgccgggttctgagtgctgggagggtggagagagggtttagagggaggcggagccagagagggcacctgatcagccccaggactcagagatgcaatcccagctgcctccactagactgtgctatcgagtcactttgctcgtctattgtttagctgagcggaggccaagggaaggcggtcaccattgtcgaagctgctgggctcactcatattttgagttggatgcttgtggctgccaggctctgtgaacaagagccctgttcatcagcaggatccaaacactggccctaccctccccagtgaggtattgtggggaaatcccgggaggaggggagtccatgtgagaccccggtggccactgccctgctgccctcttcctctggagcctgacagcacagggtgggactacctcccagcctccctgcttgacttcctcctctcctggttctgagcctgctttcagccaggtggtgccagccgccattcttacccgcaagcaagcccaggtctcctgtgtattcccttcaaacagtaacggcaaccactcagagaggaggctcgccccacctcaccccagtctaagagacctcacgtttctatattcctctaaagcaaatctcctttgggcacagactttaatctggttccacctccaaggtagagagatgtctggggattcttaggaagttgagggcgttctgggcttcagtccccactggtgactcttgccatattttgctctttgtccaggcccatgtgacctctcaaatgtgggccattcccgagattctttgccacacttgggcaggaggttcattgcccaactaggaaccttaggaaccagagtccaacacccctgggagtatcacaaagcccctccccacactagggtcctgtaccccctagggccctcaaacccacctcttctcattctctgaggaagcaccctcaaaccttcctctttcctgagttgtcccctgtacccctgaaactctagtacttcacctccaggatggcccatcctcacccagggatcacctaaggtcaaccctttttgatgacaaaacttaggttaaaagatatcccagagtttcagaagtacaaagcagtcctctttctcctggggtggaggtaggaacaagagaaaccaacatctcttcattccttttcctaataactcaccccattaccatttatagggtgctgactatgtgccaaacacaatgccaaattcattgcctgcatgaggtcattcactcctgtatcagcccttatgcagtaaagatatttattccctaccttgtgaaagaggaatgtggggttcagtaccttgcccaaactcttcaaggctattcagcataggagccaggactccaacccaagtagtctgattcaaaagctcaggctttcagatcccttgcccaaatttagtcgtttttcagtctctcccctacccttgactccccctacaagttttcttcaggcagccaaatgaatgagctgttgaaactgacacaggactagtcaactctttcctagcttggggcaatgagccccacccacctctggaatcttcaccacttactagggtgaggctccttgccttcccactccttttctagccccccaaagagaaggaaaggcattccccacccaggggagtctcctacagtcctggctcttaaggtatagtcactcattggattcttgtatcaacctcaagaggcagggctcagcatccttactatacaagtaaagacactgagactcagactttccaagctcacatctgttacagaacagagccagggttagaaaccagtctattctcaaaccctctaaaaatgctctcatcgtgaatggataatcaccatgccctagagatagtttacccagtatcgccagcacagccatgccttgagccagcactatgccaggccctgtgctggaggccttaaatgcattcttccagtgaattctcccaacaagcccatgaggtagatactatcattatgccccttttacagaaatggcagctgaggctgggagctggtcatcaacttgccctaggttaaccaagtgtaagaaggattagatccagcaccagaggcaagagcaggtggggtggagggagacaagactgtcaggagagcttgagttcctacttcggttcatggacctccggtaaggagctctaggagacccatgaaccccatgacattgtatgcaaatgtatgtatgcttatttgaaggtagggggcagaaggaaagatctatagctttcaatattctccaaggaatccctgatcacaaaaacatcaggaatccttaacctaacatagtgcctgacatagaggcactcaatatctggtgaatgaatggacacacatgaaaatgagtgagtaaatgaatgaatatccctccgtaccctaggagacaccacatatgacctggtacacacatctatctgtgtcttctgagatggcgaaagatatcctgggacctgagcccaacccacccccaggacttttctcccagtcccaggggccatagccaggtgctatgacaagctccaaagagatgcttctcccactttctccccacccccactcctaacaatgaccagagagaggcgagaattatgcaactcagataatgaagctgtattgattgccaggagggggtgagggtgaagcagggtccagctgtgaagtgcttgggcaggagaggggatcttccagtgggatctgtgtccacacggggggcctcctaggcctgagcggggctgggcagcctcagttcttggtgcgaaggacctgctcgtgggtggacaccaccttgccatcgtgcacatccatgaccttggtgcggatttggcggctggaggaggtcactggggaagaggtgggaagaggacgttaccagaggtggacagacaatggactaatcaggagtaaggaggccaagaaggtgaggaaactcaaactggctccccattgccctctcccctgattactgcttcactccctgctgttgcccaagcactgataccatcaacacatttctttcagacgagggctcccaaaggtcagagacagagtctttgccctcagattagagcttcctaagagctcacacctggctggttccatccatattcacccaatggagtggtctcagtgggaagagccctgtagggccctgttcatggtgctgaccacaacagcaataggatctgccacagacaccacgtagaagcaagaggtgggggctgcctctcctagccctaaggagggtttagaaaatagcttcttccacccaaggaggttcacaagggaaactgggtgacagcactagagctcagcccctcacggagcccctagccaatgcctagacctgcttggggtacagagggtggcctggagcccaggcctgcagaggaggagggtcttaccatctctggatgactgcgatccagaggagaactgggaggaggagaggctgtgaaaatagaaaaggacaggatcattagatacatggtggggccgtgagagtgccatggggggggcggactaaggggagggccaagactcactgggcgtcctcgccctccagcaggcggcggtaggtggcgatctcctgctccagccgcgtcttcacgtccagcaggatcttgtactcctggttctgctgctccatctcgcagcggagctgggccagctgctcctccacgctgccaatcatctcctggatctgggccagctgcatgcagtagcgacctttggtctcctccaggctgttctccagggatgctttctgtgagggagggaaagggaatcaacgattagtgagtgtggccgttctctccctgccagtcctgggtgcaccacccttcctggcactattcctaccatgctgagctgggactgcagctcaatctccaggttctgcatggtgcgccggagctccgagatctcgctcttgccgctctgcaccagctcgctgttggtggccacctcgcggttcagctcctctgtctgcaaaaaagagaatgccattcacaccagaaggccccagaaggcaggtggtctgggttccttccacctcaaatgacacccaccttggtgaagaaccattcctcggcatccttgcggttcttctctgccatcttctcatactggtcacgcatctcgttcagaatgcggctcaggtccacgccaggtgcagcgtccatctccacattgacatctccacccacctggcctctcagggcattcatctcctgcacagccagggacagtccacagtcaggagttccaccatggcagcggattggtgttccttaggcctgaatactgccctcccaccatcacaattctatctcgactctcccttctctctctctctctcaatctctctctctctctctctttttttttttttttttttttttttttttggacagggtctagccttgttgcccaggctggactcaaactcctgtgttcaagtgatcctcctgtctcagcctcccaagtagctgggactatgggcacgcaccactgtacccagcctccctgcatttcttttaagctgacttttccatatagttctcacctcctcgtggttcttcttcaggtaggccagctcctccttcaggctctcaatctgcatctccaggtcagctctggccagggtcagttcgtccagcaccctgcgcaggccattgatgtcggcttccacactcatgcgcaggttcaactctgtctcatacctggaatgaccccagagaaaaggtatgagacacccatcctgatcacagcgagggctttgttctcttctccctgcagcttctcccagagctggtgccttgtgggtggtttaaggagccaatcttgaaaatggcgtggttgaacacagtgcccattgattgctcagatatgaacattcctgcgggctggggataaggcagttcatcttgctgcagaaatcaggagggggttgcacttctagcttcagccaacaaataatgcagaagtcctccaactatgattccttcctatacttcaagggcagctggggaagtggaaagtgcctctccctaaagcagcggttctgaaacctggctgtggaccagaatcacccaggtaacctgctataaatagctgaatcaaaactccaagggtggggcccaagagtcttattcttttataagcaccccagggagttttcatgcacctatcctggtactggctagttctatttgggaaacactgctccaaaaatgccctactctggggacactggatgttctggcccaccatttcaaactcacttggtgcggaagtcatccgcggccagacgggcattgtcaatctgcagaaggacattggcattgtccactgtggctgtgagaatctgcaggatggaaaaggcacaggtaatttgtcaaatggacttcacaagctggacttcactgtagcctacattaagctcttgcttcatgttcttgcctgaatcccccttttcccccacaaaacttgaccatagcagcccaaaggaaaacagatgccccaggcctgtcctaagactttgctaactcatggtcaacagagggggtagatgcagccccgggcttagaatcgaaagcccaggagttctggtcccaattctgccagtgtcttgctgcaaaacctaatgggtcttggggcttcaagttccccacctccaggtgaggagaataatctgaggctccctagccctccttcctgagctgacctctcttctgtctgcatcagccagccctgccagtcctctgcagatatgcacattccttttcaagctcacaggccatgggacttcaagtggaactttctcaagagataaaacccaactaacacaggggattagaaaagaggactcaggggaagaataagaagatatattggcccctgagtctggttggatttccccacctcatcattgaatttccctaatccatgcaagtcattagagcccaacagactccagcagggagggctcccaagtaatgtgggagcagggaggagggggctagagtcagggcacaagcctgccaggctctctctgtgcagggcacatcaagggaccacactaattgtctctgcaggctctccatgcccgcctggctgtggggagggaccagcctgtaccaaggcttatgggcggcggcagccacagcccagactagtgagctaatgagtggtttggatgtcttgcctggtcccgttagagcctcactcctcccctgtgctggagaacaagtagctgcctcctgtgctggaaggtagggcacaagggccccagccttggctctgccattaatttgctatgtgacctgcagctggtcacagcacctctcgaagcttcaactgcttcctctaaaaaatgtaaggataggaatcactgatctcacatggtctgaggatttgagatcagaaggggatgaggaggctggggaagggaaagcatcttctcactgatcagtcttagggcatccaagacctcgaaagaagggatctggggtggactctgtcctatagagaaatcttaaggtctcaggggcctggggcatgaattgttcccagaaggagctagctggaatggtgccttctgctgcccattcacccaccttgttcctcaggtcctcaatggtcttgaagtagggactgtagtctttgatctcagcaggccgctgcctctggtaccagtcacggatcttcacttccaggtcggcgttggcctcctccagagcacgcaccttgtccaggtaggaggccaggcggtcattgaggttctgcatggtcaccttctcactgcccaccagaagcccatcaccaccagcaaagccaccaccaaagccaccacccaagccagcaccaaggccaccaccatatcctcccccaaagccactaccaaagctgctgctgctgctgctgaagccaccgccatagccgccccccagcccgcaggctcccccagaggagaagcgggaggatgagacagacaggccgcccccgtaggtgctgggggcgcggcaggaccctccggccaggacggaggagatgcggctggagccgcccccgatgccgcccccgatgccgcaggagcccttcatggagctggaggaggtgaactggcggctgcaggtggtcatggtgcagaggagggaggtgagcgagcgagcagttggctgagtgaagagaaggtgctcgggtaaattggaaagggatgcgagtgctttatactcgtgggtagggggcgggtctggcactttccattccccttggctttcatcacccacaggctagcgccaactcccagccaggtccctcctctcatccgcctcatcatgtctgtcatattttactggaaactcattgtttggagtgttttgggctttcttgtcccgccaggcgtgattcacagggggaggtgtgggcctgcaggctacactttcccatcggaccctgggagtcccagccctcaggaacccgcgcactgggcttagccagggtgacagagagcagggcctctgcaccttaaacctagttacctgctagctctccatgaactgaatgggcctttaacatccacgtagaggaagcctgctgctgcaggggatggatacccggctggaaagcaccggcatggcaaggtcaccttgggcacagacaggcctccctcaccatgaccctctattagagacaaggaggtctggggggccctcccaggcctgacctcccatgctgtgctgagaagtctgtcccatccctgaaatacacccagctagtcaggtgtatcgtggttcccaccccaacatccccatcaaagagaaatccaggcagctctccccagccctgagcacagaccctaatctcctccctatggtgaggatctcacatccaccacaccatagggcaggtggcctcatggaggccaggaaacagcctggagtcaggtgggtcctggctctgccatttacgcctctgtgacccagggcttggcacttctctgagcctcagtgttctcatctgcaaagtgggagtcataccatctattctgcttagtgcagtcagctctgagaatccaatgcgacaatgtatgtgaaagggttttgtaaaccgagtatggcaagaagcctcgttggcattgttatagcccaggcttagccccaaagtggctggagctgcatccaggaacaggcctaggggggccttttattcttccagccccagatatcttctcagacccccagaacatccctagtgtgggcagctcaggcgccctcgtttgagccccttgtggaactggcccaggagatgttctggggaggagtagaggctggagtggagctgggctgtgccaagggcaaggctgaggtggacacgagggtccctgactcctgaagccccaagggtcaggggacatttctaggagtccacttggtcctgctttggaggtgtgtatatcaaaacttcagcaatctcccagacaacctcccaaagcaaacccttccggcccccaccccaccctcccatcagcccctaggctccacagaccccggcaggcatgttgagaggaatgtgatcgtgtctggggctgcctgacgcatcctatctcctcagacaggccccaacagcccctgctggaggctccaatgctcttcctgggatcaactgctcctagaagagaagcaggaccctctgtcacccccaaccccaccttgactgtcaccaaagaagaagccagagaagggagccccccactactgtggcctaggagcttggaagacaatgctgagacagacatctgagctgtgggctccccaaatctgccagcaaaggactctcaaggatgtgagtaagccagggccccaccccgctccacccgcccctgacagacactcctaatctccctgcagagaatggtccccccaccctggcccagccctacaatttccccagagagaggcaacaggggttttggctgagggacagatgcttttgttgggaggcatgttgctgttggctgtggggcaaggggaggctgtgctcactggagaaaaatgctgtgtccagagggatctgggagcgggaatggggtgcagagcccagtaccggcttcctctgtgccccaccacccccacccaccaccaccaccaccatgtctccttcttatgcagggatcaggaatagaagctccggagcccgggacataggaacagctctactttccctttcatttcattcaataaaacccaaaagaaactccttcctccccctcctccgaggggaatccaaaagataaagatggcagggaaccaatgacagatcagtcaatcacataatcttaaaaggcacttctgcagtcccaccccaaccccacgcaccaacaccagaaccctagcatggaatataagcctgatcccccacacccggtcttagaaccgtgacccaacctggagcctgaggccaacccctgcagacaaggactcagtgaccaaggagctgcaaacaacccagccaagcagggagcagacttagaggacaccacactcccctcccctccctgatgccaaagaagcatggtactcagacattttaagggagggcattttctggggcatcaggggttaaagggttgtcagtcctgactgctgaggcccagagtaccccccacctctggacttctaggcagactttgtgtgagcaccattacctgaccctccctccagcctgccccaaaaggaggggggtaaaggaggagccccgggcaggacctcttgtggttagtgagtctccctgcaccaccctgcatgggggagccctctgccaatccaaacaggtgaagctggcagggccaggcagcacctccagagcccacactgtgtgctgaggactgtgctggggaccaggagatggcatcctaaggaaggaggaaacctcaggacagcccccgcccttggagtgcatggcctactggaagagacgatccctgcctttaggaaggtcccagcatgaaagagaagcaggaatgcacatcaacattacttaacatacaaacaaatggaagaaaagcacagacaagtaagattggtttcccagggctgccataacaaattaccacaaatttgatggcttaaaacaactggctgggcacagtggctcacgaatataatcccagcactttgggaggccaaggcaggtggatcacctgaggccaggagttcaagaccagcctggccaatatggtgaaaccccatctctactaaaaatgcaaaaattagccaggtgtggtggcaggtgcctgtagtcccaactactcgagaggctgaggcagaagaatcacttgaatccgggaggcagaggttgcagtgagccaagatcacgccactgcactccagcgtgggcaacagagcaagactccgtctcaaaaaaaaacaacagaaatgtattctctctggaatacattctggaaaccataagccctgaatcaaggtgttggcagggccacactccctctgaagactctggggaagagcccttccttgcctcttccagcttctggtgcctccctgagttcctcggcttgtggcagcgtcgccctatctctgccttcatcttcatacagtcttcatctctgtctttttcagtctcttgtaggacactcattggatttagcaatcactctaatccagtaggatctcatctcaaaccttaccttacttacatctgcaaaacccctatttccaaataagggcacattctgaggtcccaggtggacccgatttggaggaaccctatttgacccactataccgcataacagactgggtgcttgtcaccttgcaaagcaatagtaaaaactgggtggagagatagatggttgagatgagatgtgggggcggcccaatctggaaggcttctgggaacagcctttagcgtgacacgtcaagtcaccagggactggatggcagggagccacggaactctcaggtcttgggtccgtacttgacatcatccactttttttttttttttttttttacacagggtctccctctgttgcccagactggagtgcagtggtgggatcacagctcactgcagcctcaatctcctgggcccaagggatcctcccacctcagcttcccaagtagccaggactgccaccatgcccagcgagtttttacttttttgtagagacaaggtctcaccatgttgccaggctggtctcaaactcttgggctcaaacgattctcccacctcagcctctcaaactgctggcattacaggcatgagccaccacacccagcttctttttttaaaaaatgtttattttgaaataatgttagacttggctgggtacagtggctcacacctgtaatcccagcactttgggaggccaaaatggcagatcacttgaggccaggagtttgagaccagcctggccaacatggcaaaaccccatctctactaaaaaatacaaaaagttagctgagcgtcatggcaagcgcctgtaatctcagctactcgggaagctgaggcaggagaattgactgaacctgggaggcagagattgcagtgacccaagatcgcaccactgcactccagcctgggcaacagagcaagactctgtctcccaaaaaaaaaaaaatgaaataatgttagcctttaagaaaaagttacaaaataggacagagagttcctgtgtatcctgtgtatccttcatccagcttcccctaatgtgaacatactacataagaatcatacaatttttgaaaccataaattaacattgacacaatactttttccccccacaagatggagttttgctcttgttgcccaggctggagtgcagtggtgcaatctcggctcactgcaacatccgcctcccaggatcaagcgattctcctgcctcagcctcccaagtagctaggactacaggcgctcaccatgaagcccgggtaattttttgtaattttagtagagacggggttgagccatgttggcctggctggtcccaaactcctgacctcaggtgatccacccgcctcggcctcccaaagtgctgagattacaggcatgagccactgcacccagccaacacaatactattaatgagctgcaggctttattggaacttccaccagtttttccacacatgttccatttctgctgcggggtccaatttcagtctccacattgcatttagctatcacgtctccttagtctcctcctatccatgacagctcctcagtcttttcttcctttcatgaccttgacacttttgaagagtactggggtgatcaattattttgcagaatatccctcagtttgggtttttctgatgttttctcatgatcacattgaggttatgcactttggcaagaaaaccacagaaatgaggttgcatcccgtcaggcatgttggacagatatgtcatgtgtcttaccgctggcaccatcaggcatgttggacagatatgttgtgtgtcttacttaccgctggcgccgtcagccttgttcacttggctaaggtggtgctgctggatttctctactgtcatgtttctgtttctcccattgaaattaataaataccttgaagaaggtacttagaaactatgcaaaaatcacgtttctccttaaaatctgacccactaaattttgcctccatcagtggagggaacgagctcacctcaacctgagtttaagagcctcatttgaaggaactccttgagggactgtggcctgcaggagagactttgggagatccaagcccagagaaagaactctttcctgctctgttgtccccccccaaaaccaaactgggccacctcaaacccgagatctctgtgccccaagacagcagtccgcaacctttttggcaccagggaccggtttcatggaagaccatttctccttggatctagggggtcgggggtggggacggtttcaggatgaaactgttcctcctcagatcaccaggcattagttagattctcatgaggagtgcacaacctagatccctcgcgtgcacagttcacggtagggtttatgctcttatgagaatctaatgccactgctgatctgacaggaggcggagttcaggcaacaggaggtggagctcaggctgcaatgctcactcaccagcagctcacctcctgctgtgcgggtcctaacaggccacagctggtagagtctgtggcccaggagttggggaccccttccctgagacactcccatgccggcttcccttcacaacgtattattgtggagaaatagcacatatttctctcacgattgtcaagagccttgctaggcccccgccagccctggggaaagaagtggggaatctggttcctctcatgtcacagatgggaagtcttgagtctagaaaggcccagagtcaagtaacaaattggagcccccattgtgattcccaggcccccagaacctgccaggggctgagcttctcctttcctcctggcagagtcctgcacccctccctctcctctcggcccctctgcaccctcccctggagtacccccacctctggacttctaggcagcctttgtgtgagcagcattacctgaccctccctccagactgccccagaagtagtggggtaaaggaggagcccagggcagggcctcttgtggttagtgagtctccctctaccaccctgaatgggggagccccgtgccaatccaaacaggtgaagcgggcagggccaggcagcccccccagagccccacccccttcaccttgcccatccctctccccgccaagcctcagaaaactgtgtggagagtgggtaaagctcctagagctcagggctatcacttgcagagacagtgggctggggagggagaagcctcagctgccagaagggcagggcttacttggaggccataagtcggctagcaggcaggattgcagcacaagggagcaggagcctagagcacctcccgaggccccagggtccccttttccccagagagcaggagcctagagcacctcccgaggccccgggatacccttttccccagacagctatgccgcctgctgatttcccaggccagcctgcccatctgggctgacacaagagatgggctgagccagcatttcagtgtctgtgtccttgtctgagcctccaagctgtgccacaaggctgacaacagagcttggccagcccatatcatagaataagaaagctcagaggtggaggagttcccccaaggcccacagcaagccacctgctcagtcagggttccaccccagctcagctggctgcaagcctcactttttaatgacaggtcctctgctgctagaaagcccccaaaagtcagagccaaaaacagcctctagaccaggctcttaactttacagatagaaaatgtgagtcccagacaggggaaggaacatgtccaaggtcacacagcagaagtgtcacccagggttctgagctaggcagggtaagaatatgcctggggtgaaaagggctgtgcctgcaccccagagtcatgttcaggttgttaaaaatgcagacagtcaggtggccaaaggcaaggaatagattagtttacaaccctgccgctagctcccagttcaggcaaaatgcagcttaaatgctccagcccatcactcatgagaccccactgtaaactgggtcccctccccaacaggcctgtccccttgctggtccctacatctccatccatttccaatctctgcctgaatttccacatatgtcctctcttcctacccaaacccctcatgttctttaaggccaagcctcagttccacatatggtttatgcagattcctgcagactgtgtggcacaaagtaggtgctcaatgaaggaaggaagcacagagggagggaggatggagagtaagaggagggaggacagaaggaggacagagggagggaggagggagagcaggaggaagggaaagggaagagggtaagggaatgtagaagagggatggatggatggatggatggatggacatatagacggatggatggatggatggatggcaggtggacagatggatagatgagtggaaggaagagaagaacgagggaaagtggagggatgaacggctggggagtgatcagacagggaagtagatgaatggatgaatggaaggaagggaataataatgggtaaaaggatagagggatgaacaggaggtgggtggatggtgggtaggcaggtgggtgaaggatggtggggcactgagaaaggacagccagcccagctgggggcagagggggccagcatcctagaggagctcttaactgatctgaaccttgaagatgagtagatgctgagcaagcagcggaagtgaggatagacatcccatttgcccaaggaagcacccaggcaaagtgcagacgtgtgaaagactggtctgatggaaactgcaagcagttatgtattgttagagttcacagctcaaggctgggcctgcccgatgaaactgagagccttaggccaggtggtgataaaggtgctgggaagctcagactttatcctgatgacactggagccactgaagggtcctaagctggtgagtgatgctgtcggatgtttcacaaaggccaccctggtctccatgcagaacatactttgccgtggtgtgggggaccagtagggagaatttgccatatccaggtaagggatgttgttggctcagacctctcctctcccaggaagccccaccccatcagctcaggtcacctggctttctccccatctctcagacctcccactgcctctgtgatctgtgcccccacccttgattatacctccccatagtgccttagggggccacaaagtgtttttcacatagtcagtcctcagtgttactctggtctgatgcaggagacacaacccttgcccgtgggctgtccagtctgatggaggagggttgcagagcccagagttttccctgtgccataggctgaggggagccaggagcacaggagccacaaggtggggtggattagcacacagaagttttcttggaaagggtgcgctttgactcaggttttgaaagaaggaagaaccctggagggtggagtggggagagggcgtggctgtgggaactccagcacagtggtgagttgcggggagagtcagcacctgggagtcggaatgtctgtgtcaggagtcctgagctctggtcggcaggacagagggaaagggaaagaggaagggaaggggtcgccgagtagttctagcctcatggatagaaagagtcatttcccacagtcagagatgtgggaacagattcagcatcttgcaccccacctccctcccccagacgggataccgcatgggatcaaggaaggagcagggcctcccgatcagaaagaccagctttcaagtcttggctccatcactgacgagccatgtgaccttggacaggccattgcagccgtccaagctttggttttccatcaaataggaatagaaccagttcagcctggcaggattattgagaggagtgggtaagtcagcgcaggtggccagcatggtactgggcacagaggaagtgtttggtaaaagttcacttaaattaagcccaagttagaccaaagggagtgggggatgcaaatggagaacaggtgtcaaggttcagccaaagaccttgaggcagagaacagagaagagtccaggatgttactggagctcctgttgcaggagctgggagctgctgaggtcagccggccaggtgatgggctggtgagtctgcaagggcctggccagggtggaggctgtgggaatagggcaggcctggaaactgatgaggaagagtcagcggatggtttaggtgtgaggggagaaggcctgggagcttccagcagggcccacattctgtggctggaatgaggggatggggaagcagcctctcaggtttcaatgaggccatcctggttgtcagtgcaatatttgcaaaaaaatgaccatttctgtctcccagttccaaaagagggcatggatggcttatgataaaagacatatttataataaaactaaaaatatccagcaaggatagaagaaaaataaatcaagaattaggtaacaggatatattgatgggcacattttggttgcaagcaacggaaactcagcttgaattagcttctaaaagaggcaattcagggctgggcatggtggctcacacctgtaattccagcgctttgggaggctgagataggaggatcacttgagcccaggagttcaagacaagcctgggcaacatagtgagataccatctctacaaaaataaataaataaaataattagccaggcatggaggcatacaccagtagtcccagcaactcagaagactgaggtggaaggattgcttaagccccagcaggtcaaggctgcagtgagccatgaccacagcactgcactccagcctgggtggcaaagtgagactccatcttaaaaaaaaaaaaaaaaagacaatcaataaaacaataaatcaagccccaatttataacatttatttttttcgtgttgtaaatacccccactgtggccaatttcaagcaaccaacagggagtcacttaacacagggttgggaagagacgtgcagtagctcactgccttatagcatgtccaccatatggataaaatggtcataagtacctcaagagcacagatattagtacaatgtagtaaaataatttggaaggaatgagttttcagtatgcattacctttgttctcaatataattcatttaattttaagttcgtataatttaatttttgatgagggccatatttaacaatcaccttgcaaaattcctgaaattttaatgtccagctctcaagagccagcatgagccagctccagcgtgccaatgagcctcgaggtttaggccataagcaagagactaggagggacaaagggaaagcttctggataaaacaaagtgaaagagggaaaaccagattgggggaggatattggtgagggaaggggaagaagagttggtgggcccccacggtcagggagacagcctaggtggacaggagcagaggcagcatccagaggctgtgcagccttcacaaggcagaccaggcactgtctgcctcccagggagccacatgggagccccatgggggtatccaagtctgtgctgcctcgttatctcaattatctcatcagtgttctgttggttgttctctctgtcagcatctagcgaggactgttctactgcagcactcagtgtgcatctgtcctttgactgtcccagcttgagtgatgtctgtgtgtcccaagactttggttactccccatctaacttaacccatatgagcaacacccccttcaaagaactggaggagtgattgggggaaaggaaatgatggtgctgggggtgttggaggtactggaggtagtggtggtggtggtggtggtggtggtgatggagatggagatggtggtaatgatggtggtgattgtggtggtcatggtggtgatggtggtagtggtaatggtggtgatgatgtggtggtggtagtgggggtgggggtggtgatggtggtaatgatggcagtgattatggtggtgatggcagtgatggtggtagtggtgatggtggtggtgatggtggtggtggtggtagtggtggtgggggtggtgatttcagtggtggtggtggtggtggtagtggtggtgggggtggtgatttcagtggtggtggtggtggtggtgcaggggcgagtggtgatggtgggggtgatggtggtggggcgtattggtgtggtgctggtgattgtggtggtgatggtagggatggtggtagtggtgatggtagtgatggtggtggtggggctgtgggggtggtgatggtggggatgatggtggtgggggtattggtgtggtgctggtgattgtggtggtgatggtaaggatagtggtagtgataatgttggtgatggtggtggggaggtggtgatttcggtggtgggggtgttggtggtggtggtggtgatggtagtagtgttaatggtgggggtgatggtggtggggggtattggtgtggtgctggtgattgtggtggtgatggtagggatagtggtagtggtaatggtggtggtggtggtggtggtggtggtggcggtggtgatggtggtggtgatggtggtaattatggtaattatggtattggtggtggtggtggtgattatggtggtgatggtagggatggtggtagtgttaatggtgggggtaatggtggtgggggtattggtgtggtgctagtggttgtggtggtgatggtagggataatggtggtggtggtggtggtggtgatggtggtaattatggtaattatggtattggtggtggtgttggtgattgtagtggcaatggtagtgatggtggtagtggtaatggtggtgatgatgatggtggtggtggtgatggtggtaataatggcagtgattatggtggtgatggtagtggtaatggtggtggtgatggtagtgatggtggtagtgataattgtgatggtggtgattatagtgatggtgggggtggtaatggtggtggtgggggtggtaatggtggtggtgggggtgttggtggttgtgatggtgatagtggtagtgataatgttggtggtgatggtggtggggggatattggtagtggtggtggtggtaatgatagtgatgattatggtggtgatggtggtggtggtcatggtggtgggagtggtgatgatgagggtggtgatggtggtgctggtggtgttagagaaggtaagtatgacaatgaaacccctgagtcaagtctcttgttctgtagaacagaacagaaccagtttaagcagtcatcaccttgagctagcttaggggtaaaacataccctcttacagtctcattccaccaaagttaacatgtattgaggacttaccaggggccaggtcttaacttcatcatgtcttctaatcctcagagcaacactaaggcaggtagggagtggggctggggttcaagcccaggcagatctgctcctgggggtgggtggggggtggttattctcactgtagagaactcactaaggctgcaattcttgtggccatgtgggcagatagggcaaacaccagccactgtttaagcctctgtaggtccacagcccagtccccacccacttacctagaagaggaggagagagagaggaagcgtcagccaaggcccagctattgagaaagagctcagccagtaggggtactgcccatcccctcacacatcaaaggcacctctaggggaaggaggacaaaaagcaccattgcctgtgtaggtgctgtaaataagtatcttatttaaggccaaggtggctcctgacttatcactgaatccccaccctgcccccaccccaaacccagcacaacacctggcccagaacagcctctaagtggacttggactgaattcactggcctactgctagcacccaccttctctgcaagcctgatcaagtcaaacaagaccagggatcttctcaccagggaagatctatgcagaggcggcacagggttgggggtgcagggcattctgacaccccacctactggtcacgcacccttgagtaagtcgctcagcctccctgagcctcaatttcctcacctgtaaaatgggatgagtcaggtgtgtggagatagcgaggaggccttgcagggagcatgcagggagaaggcatttgctccagctcatctttaggaagcagaacacagctgcctgtctgcagccttgctgccagaatcaaatcaggcaataaagggttgggcaacattaaaaattgtcaaacaggagagggaagcaacaaaaaatgtttattgggtacatactgtgtgttttatccaccctttatctcctctattcctcaaatgaactccttcagataaatactaataccctaaatgtacggatgaggaaaatgaaactcacagagaccaggggcgggtggaggatccctccaagttcacgctggaagttcagcttcaggttagcctctgccctccccccagctattcgacactacctcctgcaaaggactgtgatctgatctttttaaaaaatgttttctcttggttatcagttttaatttgtatagttatattattatctaagcataaagtaaattaaaaatctattttatgatcacataaaattgacaggccagaatattagtgcatgcaatctgtttctaattaggaagtcgatgtggtattcaacaaattaattgattctttggttcttaaattgttgtttagtttctttattcatatacacacacacacacaattttatgcacatgtattaaaatgtgtgtgcactctttttgttcctttcctgtttttcttggctccccttttcccctcaaccactgccacccacatcagccttcaaccccacccccacagtaatctatgttcataactctgtatgtatcttttcatattgttggtgcttatataatctcacagacacatgcacatgcatttacataaatgagggatgaggggttggctgtttatttcacataagtgaaatcaatatcctacatgtacatttctgcattccacatttctctctctccaatccctggaggaatccctccttgccatccaataaatagctccaatttattgactataatggctgcttaatactccagggtagcagtggaccattatttattccacctgtccactatcaacttttaaaaatgtgtttgccaccttctgtcactacaaataaacagcagtaaatatctttgcacatatgcctttttatactggtctgttatttctattaatttaaaattaagtgaagtcccttaaataatttgaaagtcatctttgctgtataatcacatataacaaagctggaaaagaacctggtagaataaaaggtctggtgacagaacaatggatgagtgttttcattttctatatttccttttgtttcgtcacactattcatatggtagataaaagctagagacgtatgggattttttctgttgttttttgttgttgttgtttgagacagggtctcactctgtcacccaggctagagtgcagtggcacactctcggctcactgcaacctccacctccttgattcaagcgattctcccacctcagcctcccaagtagtggggctatgggcacgcaccaccacgcctgtctaatttttgtattttttggtagagatggagtttcaccatgttggccagactgctctcaaacacctgacctgaggtgatcctccctcctaggcctcccaaagtgctgggattacaggcgtgagccacagcaccaggccgacgcatgagttttatgtgtaacaatcctaacatggtaggagaaagagggacccttgcaatcaacagtgtgttaactaggggtgaagtcagaaatggcgtctcctggatagctgccactattgctttaacaccccttgatctgctcaaagcccttcgggggtcttggactgttggggattccaggatgcagacagcacatcagaggaggggccagataaggagctccactgcctcatgcctcagttctgtagatggggctccatccctccagggctcaagaagatatttgctttcacatccatgccagcttgtcaatacctacccatggagacctccctgtgccaacacaatgagaagcacatggaacccagagaagcctgccctcaagaaattcttctgagcaagttctgtggagtcctgaaagagcagagacttctaaaccaaacctccacggcctgactccacaagtctttactgagtgtcctttatgggctgggtaccatccaggggctgttggtaactagcaaaacaaaagtttcattactgtttatgtttcggggagcagacagaaggtcttaaacaacaagctacagcagtgaaaagacaagcacaagaaattgcttatctcatacactaggagggacactgagcttattagagctctcagaaacaatggacccaaagaaagcagagctttacaagcataccactcattcatttacaacagcagatgcactttatgggctgccattaattctcactctagtcattgtttttgcacctcatgcaattatctaaaacaatatttgccgaactttgacagtaagtcaagcataaggaatctgaaggtaccttcaaattagacagatttcaaggaacactgggagttctcaaccttctcagctcaggtgccaggatcttaggaagtgggaaagaccaggcaagagcaaaaggcagtctgatttggggcttgaatcatagtttgagaaatccaggcagcaagccatttccagatggaaattctggttcccttattgaagggaaaactcatatttctgcacaatattgtccttctgtttaaaaggggctcatgatttgtttctacaagataacagcaatgaagaagagataagtgatttctgctctccgggagttttgctaagtgactgtgagaccccaagaaagttttttttttaattttcctttaactactgtaaacctgaatttctgcatctgtcaggtagaggcctttcgtgatgagctttccaaggatctgctcctgggggttaggcactcggaagatacgggtacagacaacttctttaaaatagcacccatgcccaggctgggcatggtggcttacgcctgtaatcccagcactctgggaggccaaggcaggcagatcacttgaggccaggagtttgagactagtctggccaacatggtgaaatcctgtctctactaaaaatacaaaaaaaaaaaaaaaaaattagctgagtgtggtggcacacacctgtagtcccagctactcaggaggctgaggtatgagaattgcttgaacctgggaaacaaaggttgcagtgagctgagatcgcaccattgcattccagcctgggtgacagtgagactttgtctcaaaaaataaataaataaataaataaaataaaataaaatagcaccgcatgcccagttggagggtattctacatcctctgttctgacatctcattaatgaacaactcatgaaagtgtgtgccagcccaggagttgtttagtaacccaggccaggactatgtctctgtgtaagggtccttccacaacatcatctttaaaagaatcagctgaatcaatttaccaaagaggtttttaaagataatactcacagttgatgagcatgttttgaaataggcactcccattccctgctggcaagatatgcaaattggcacaatttctctttaaatcaatttggccattcaaatcgagaatcttaaaacatctgtatcttctcatctagtatacatctaggaatctagcctaaggaaataatcaaaaatatttgtgggagctgaggcaggagaatcgcttgaactcgggcagcagaggttgcagtgagccaagatcatgacattgcactatccagcctgggcgacacagtgagactctgtctcaaaaaaaaaaaaaaaagaatgaaaaatggtatagacatttagtgtaattgttgttgtaattatagttggtaagatatgtttacttcatttttacttcatttatacatatatatgtataagtacataaatatatatgcataaatgtattttatttatacatatatgcataaatgtatatatgtataaatgtgtatatatatgtacacagtcacggattactttacaacaggaacgcattctgagaaatgcattattaaataattttgtcattgtgtgaacaccatacagtgtacttacaaagacctacatggtataacctacttcataccaaggctagatggtatagcctattgctcctaggctataaacttgaacagcaggttactgtgctgaatactataggcaattgtaactcagtggttggtatttgtgtatctaaacctatctaaacacagaaaaagtacagtaaaaatgtagtattataatcttatgggaccactcgtgtgtatgtgtgtgtatatatatatatatatatatatatatatatatatatataccatccatcactgaaaaacaacatgttgttatatggtgcatgagtgtatatatagagagacagagagaaaaacttgtaaaaatactatcagtggttacctttggtatcgagatttggggttcgctctgagtcataggctcaccctagggcttgggagacagggtgaccagaaaaagggaaacacattcgctaaactaccaataatgccaacaatgattgtgcattatagagtaatgaatcaggctcagcagccttgaaagatgaatatggttttgtcatgtaaagcagagacttcagattaaactcaggttaaacttgcagtttatcttcacctcctaaacactactaaaattactataaatggataaaacccatggggtcaaagagatcaggaaactagattatagcaatcaagttttggaatctggaaaacaaagacaaataaagcccagcgcttgcccagagagaagccaagaggcaaagcatatttacactctggaactttttaactctgaatttttaagaactctggaaactctctggaatagggggcaccaggtacctctgacagtgaggaacaagtgaactagaaatgggagggtgagctagagatctgtataaaaagcagagaggcggccgggcacggtggctcatgcctataatcccagcactttgggagaccgaggcaggtggatcacgaggtcgggagattgaggccatcctggctaacacggtgaaaccccgtctctactaaaaatacaaaaaattagccaggtgtggcggtgggcacctgtagtcccagctactcaggagattgaggcaggagaatggtgtgaacccgagaggcggagcttgcagtgagccgagatggtgctactgcactccagcctgggggacagagcgagacaccatctcggaaaaaaaaaaaaagcagagaggcccctgtagctcctctctcccctccttgtctgatcccaaccactccacgattactccaggagaaactagatgtttatgctggagaatttccccagagggactctgaatcctgagacaccaagaagggccaataaactataatcaattagtaacagagtagctgagactgagaccttctctgcccccttcccgcactcagcttccagaaagctggtagcttttacaatccagacagaaaattagaggtattccttctggggaagaccctacccaagaaaagtcctacagataactgttccccattgaaacgcttattctccaccagattactctatactgagacctatcagtggcaagctcccatgctatccacacacatatacacatattccaattagtttctcagtgacttactcttaaatatgaacgactaccaaggaccactagacatctgagaaaagcctctggcatgaaagatggaggcaagacaaacagcaagaaaggaactgaggaaactgagccgatgacagaaatagaagcattgctggagccaggactaataggctcaaagagatagagaaactattgcatcttgaaacaagaacaagagactgttgaaaaaacatgcagagctatgagatatgaaaaatataaaagactgctgttgtttttaagacaggatctcactctgttgcccaggctagaatgcgatggtgtgatctcagctcactgcagcctcgacttcccagtctcaagtgatccgcccacctcagattccctagcagctgggactacaggcacaagccaccacatccagctaatttttgtatgttttgtagagacagggtctcactatgttgcccaggctggtctcgaactcctgggctcaagcaatccaaccaccttggcctccaaaactgctgggattacaggcatgagttgctgtgcccggccaaatacagcagattttttaaaactctgaataatggagttagaggtcaaagttaaagaatttctcagaaaacagcaacaacaacaacaaagaaaagacaagatggaaaataaaacagaatacccaggaaaaagagccatttcagaaagagagaaaatggagggaggaaatcatgaaacacgaaaatttgccagaattgaacaacatgagctcccacattagaagtttctgctagagtccagccggtggatgaagttacagctgcatcaattcaacacatggtatttcagcctgctggagagaaagagaagaactgaaaagcttctagggaggagagtgggaacaggataataagaaatgatctcgagtcaacgtggcataagacttctcaacagcaacaccagaagccaagaaacagtgaaactgtaccttcagacgctgagtgcaaatgatttccaagctagaattctatacccagccaaactatcagtcaagagtgaagataaactgaagatctttttgacacaaatggtctcaaaaaatttaaccccgataactccctttccaggaaactacttgaggatgtgcttcactaaaacaaagggaaaaataaaaacaggaaggaggaagacattggatccagaaaacaaggaatgcaacacaggaaaaagaaggaatttcaggatgatggtgaagagagattccaggatcacagctgagcagaagacccagacagcacccagaacagacaagagcaggacagaaggccctaggagacacatcttcatgaggatgaaattgatagaacacccagggttctaaaatactgaggagatttatacttccagcagtgaatcaggaaacaaattaatgatcaatacatagaaagtttaggcaaattgaaaaggagatatttattccaaggaaatttaatatagcataaaatgtaacatagtataatatatggtttgactatgaataacatttaaatagtcttaataatgtaaacatttatctaacaaaaatatgaatatattgagaaggtgggaagaagatatttaaaaaagaagtgggcaggcacaatgctgtataacagatctacatcctcatccttcacagccagaagtcaagcgattaaaaactgaaacacaaaaatcaaacagtaacaaggtaaagcctgttatttagaagtaaggagacaaatcccaaaagaaacagctgaagttgaaagggggaggcgggaacagagctgtgatatccagtctggggatggctttttcattaaaaaaaaaaaaaagaagaaagaaagtcttattcacaatagcaaagacttggaaccaacccaaatgtccatcaatgatagactggattaagaaaatgtggcacatatacacattggaatactatgcagccataaaaaagggtgagttcatgtcctttgcagggacatggatgaagctggaaaccatcattctaagcaaactatcacaaggacagaaacccaaacatcacatgttctcactcataggtgggagttgaacaatgagaacacatgggcacagggtggggaacatcacacatcggggcctgtcgggggtggggggctgtggggggatagcattaggagaaatacctaatgtaaatgatgagttgatgggtgcagcaaaccaacatggcacttgtatacctatgtaacaaacctgcacattgtgcacatgtaccctagaacttaaagaataaaaaaaaaaaaaaaaaaagtcttggctgggcgccatggctcacgcctgtaatcccaacactttgggaggccaagacaggcagatcacgaggtcaggagatcgagaccatcctggctaataaggtgaaaccctgtctctactaaaaatacaaaaaacaattagccaggcatggtggcaggtgactgtagtctcagctactcaggaggctgaggcagaagaatggcatgaacccttgaggtgaagcttgcagtgaaccgagatcacgccactgcactccagcctgggcgacagagcaagactccgtctaaaaaaaaaaaagtcttatgatgttgtacatacataacatttttttaatttaaatagttaaaacatggaaggcatccaggaagaaggaacggcaactgagaggtatgggccatatctcagtcaggtaggggtgactcaggggtttggagctgggaggggcaggaggacaccaagctgagttgagactgaaggctgagtgctgcaggggaatgggatccatcgcaggctgttaagcaggggggtcctgatctcacccttgttcttgatcttgaccacattctggtggaaatcattcagtggaaatttaatgtggatgagattgactctcaaaggggacccagttaggctgtgcccaggtctagggagagaggaagaagatctaaacatggcaatggccatggggcagcaggtgtttcctagggtgctcatcagcacgcaattcaccagctgatggaaatgaggaaggaggagttgatggggtgtgaggagaagcaggctgggagaaggaggatttcaggtctgacgaggacactgttcttaaggaagaaagaactcccttccaccctccagcgtagaaactgtgtgcagatgtgggagagcccatgggtagagttaagattcaagcatgggagtctttgggttaaaatacctaaaaaggtagagtggtgttaaaagaaaggcatggactttgcagacagacagaactgagtttgagctccagccgtgccacttactatctgcatgattttatgcaacttactgaaactctctgaattctgggggttgtcaattccaaaatgggcctgaccatacccacctcacagggttgcaaggaaaatatcataaataacctctgtagaatgcctccatggtgtcagtcaacacgtgtggacactcccccatcctgtgtcccacctcccacttccatagagcatggaggtcttccaggaagacccttcaagatcttctgagatttgtcccatttcccacatctctcaggctgtgaggctccagaaggtttctggaaagcacctgcaactcccctcccatcagttcaagaacagagatcacacaggtttgcatcaaccagaaagtcagctttattagcccaccaccagcagaggagcaggggagatagctgggaactgcgccaggagagcagggtcctgacccgggccttcaggaggtgaggccagctggtgggcaggaggctgtggtagaggcagctcagttctaggagctctggccctggctgaagctggatgagctctgctccttgaggatgggccgggtctgacggctcgaagaggacgaggaggaggtgaagactgtgggagagagaagaggaggtgagaaggggtctgagagctaagctgactccagggcagggagaagggagggctgggagctctgaggagaagggcccagcccccactccatggaaacaggcagaggggctgcagtgccggggagcctcagaagccttaccctcgcgggaagaataggattggccagatgcttgctgggaggaaaggctgtgggagagaaaaagcagggcagtcagttgtgctgagagcagcaggggggctaaagggtctgggaggcagaactgaggggcctgggactcactgggcatcctcgccctccagcaggcggcggtaggtggcaatctcctgctccagccgcgtcttcacatccagcaagatctggtactcctggctctgctgctccatctcacagcgtagctgggccagctgctcctccacactgccaatcagtccctggatctgggacagctgcatgcagtagcggcctttggtctcctccaggctgttctccagggatgctttctgcaagtgagagagagaaaaagagtccatggaggtggtcactcctgttcctccaggtctctgggcatgttttttgagagatgcctggattttgatcccagttggggtactgatgggccagacaatatggagaaaagctagcccactattctagggcttagtttctctatctatataacggtcccatgagtcccctggtcccatcctgagaaaagaaaggtggaactagactgtggctttttgagggggtggtggccattactggtgacttgggggctgctgctgtgctgggtccttcataccatgctgagctgggactgcagctcaatctccaggccctggagcaccctccggagctccgtcacctcactgcggctgctctgtaccagttcgctgttggaggccacttctttgttcagctcctcggtctgaggcaggaaagcagagtgaaaggtgaggctctcccaaagcccccagctgggaagtgctgcaggctcactgcgggcccgagccccaccttgctcaggaaccaggtctcagcgtctctgcggtttttctctgccatctgctcgtactggtcacgcatctcattcaggatgcggctcaggtccacgccaggtgcagcatccatctccacgttcacatctccgccggtctgacctctcagagcaagcatctcctgggaagggatggcaggaggcggtcagttcagcagacttctctcctggccctgggtgcatctggcaaccccaccaaaccagcctcccaccccggaagccagcagcgaccgtacctcctcgtggttcttcctcaggtaggccagctcctccttcaggccttcgatctgcatctccaggtcagtcctggccagggtcagctcatccaacacccggcgcaggccattgacgtcggcctccacagtctgccgcagggccagttcatgctcatacctggcaggacagaggtcaggtcctcaggctgcagccctgaggattctgaggctcggggtctgctggccctgctgggtggaccgccccactctttgtcccttgccctctgcccccagcccaccatgctggctgctcacttggtcctgaagtcatcggctgccagcctggcattgtcaatctgcaaaatgggctgcgcattctcaatggtggccgcaatgatctggagtggggatggaggacaggagccctggtcagccaaggaccttactacttgagcatgaaaggcagaaaggggcaaaaggaaccgccccaaatctggaagtcttctggctggcagggctggcatgccttctccaccagctcaggctacgtagggatgcactccatcccgatcacccccttcctgggcccaaggcagggaagctgaacttgcagctgaacccttgaaggaaataagagatttagggtaacagccccagtccgggcacagagatactgaaaagggaccctctgctaccacttccctgggtgatcctggccactccccaaaggtgcccagtctccctgtttgtaaagtgtaattgctaaaaagaggtatcccaagggccactgtagccccagcctctctcagtgctccatacaccaaagtcacccaccttgttcctcaggtcctcgatggtcttgaagtagggactgtagtctttgatctcactgggccgctgcctctggtaccagtcacggatcttcacttccaggtcggcgttggcctcctccagagcacgcaccttgtccaggtaggaggccaggcggtcattgaggttctgcatggtcaccttctcactgcccaccagaagcccatcaccaccagcaaaaccaccaccaaagccagcacccaagccaccaccgaagccagcaccaaggccaccaccatatcctcccccgaagccactaccaaagctgctgctgctgctgaagccaccgccatagccgccccccagcccgcaggctcccccagaggagaagcgagaggagacagacaggccgcccccgtaggtgctgggggcacggcaggaccctccggccaggacggaggagatgcggctggagccgcccccgatgccgcctccgatgccgcaggagcccttcatggagctggaggaggtgaactggcggctgcaggtggtcatggtgccaaggagggaggtgagcgagtgagcagttggctgaaagaaggaaaggtgctcaggaaggctgagagcgtgctgtggctgcctccaaccccagagacctttatatgcagctggggaaggcggggccctcctaactgctgactccaggttcccctctggatttcatcactcccggtcccgtccaactcctcactctggattattcagcccaggatcaactctgctgtgtgccggctcagagttcccacccagctttgggggtgtggggccgagagaaaaacacagaaatgcgagttcggtggtgactcaggctaggcggtggggaatcaggctccctttcctggagccctcggggccagtcgggccttggcacaggtggctttgtggcaactgcgtccccaggcagtgagtcagcccttcagaagaactccctgccccacagtgacagccttggctgaaagagagctcagtgatgccatcctgggctgtcttggggagcagttgtggggatcccacatgtcccactctgggcaggggcagagttcctgtcttcactctgcttgctgtgtggcctgaggctccccacctcccacctctgggcctgtttcccctcagtgaccaggctggactgggtgactgcagagtcccttctgttctaaaaatcctataactctctttcccctcttggatctaattccagttccagaggctgccttgagcccccgggatctccagaagtgtgtgcaccatacaaacagcactggccatggagctagacaggcggcactgagtccctgctctgcccttaccaactgtacagcacaggctggtcctatagccccttggtcctcagttttctcatctgtaaaaggggatgacacaccactagccacaaagaaacatgcgcgaaggaccccaccggcccttccccgagggccagccctgcccctcagcctccccatcctgcccctccagccacctgctcctcacactcacctctacacactggcaccatcccgcacccctaagcagggccctgcgccccccacactcccagctgaagaacaccacagccccacacctagctctgccactcctctaccgccctctcctaatcacaggcaccccacctgcaggctggtgggagggagccccatcctgccactacagccaggtatgacccctgaccccacctgggcctcagagtccccccctaccctgtagaaacaggactagccggggatccgttcccagcagttctctctcctgtgtccacagatcccaggctaggcctggcagctccattcatccagctgagctgggggagagcactggttatgggcccactcaggcatgcatggagagcccagtgtgtgccatacagttctgtgagcgtagagattcactcaaagtcactctgctttaagctgcagagctgcaactagaacccagaactctggccctctccaggctcccaccatgcctgcaggcggggccagtatacccaactctcacccacctccccacgatcactggcaggaggtctgcccatggtgggcatggccttggcctgagagcctggtccagcaccgaggactggagggaggatggaggggtctgggcaccaagacggggcctcctcagggtgctgtggggcatccctcggtgctggccactggccttgctctgcagtgtctctgttgaggtgaggagcccagagacagcctgcttctgcctgagctccactggggcaggcaattccttgtctcagcagaaccagggttttgtcactgctacatctcccctggtcattcatcccagaggtaagagcagaacggatgcacatcccttcagagtcaaacctgggagagggaacctgacactcctcacccctaccccaaaaaggggcaaaggggaccccggaatcttggacaaaaacctcagtgttcaggtgtcaggttgggcctggagttctggtccatccacagacccatcaccctcagaactgaaaatggtcttcaaggtcaccaaaggctattaataccccaactggagagagcgaaagccttatccaggttaagcagcacaaaagtgagagagcagagactcgagccagctctaactcccaagccaggattcacaccgactctcgtagtagagtctctgagaactcttcactctctgcccccatcgtgtgtgcatgcacacacacccctttctcattggctcactgccccccaccaagttccccattccaggaggtgtcagggcgggattatacacaagcccagcactgcagacctggggatctgcatgggctgagaagctgcaggaagttgctgaccaacgcgccaaactgctcagccaactccatagatcacgcacctgctgtgtgtacagctctcgggggctgggggtgaagagggagatgatgacatagtctctgaccttagaagaacttatcatttgaccctggagggaaaactaatgctggaaaatacagaacctggctagaaaccctggggtgctgggcttgcctgccatgcccacaccacaggaggcagctggggtaggcattgccccgctgagcctcagcagtagaggagggggctgccctcctggccttgatccctgaaagggtcctagcagagagaggcaccagcagggcctcagaggatctgagttgacagaggaggaggaggaggcgtttcctgtgcaccagtgatgcacacctgccccaaggtggccaagagccaggaccactaagcctggtgagcacagagaagcccagtgggcatcctccaggcagaggattcctccccacaccctgcctccttcctccctccttcgtactgcccatgtcaagcatgaggcatgagatcatggcatacctgaggcagccgggaaacaccattggccaatgccacgccttgacttgcagtgattctccaaccagacagatcgtcagagtccccatgaagatttgcagccctgctccaactcccgcatcagcaccgctcaggacaagcctgctggtggggctgttttacaagctccccagccaactcagactgggaaggcaggaggcagcttgggggctaaggaggggggcagagaagctgaggggagagagggggctgctgcagggcccccagcctcgggtggacaagccagagccacaggcttcagggcaggaggaaggaaaagtagagccccactgagccaggacagagcagcctagaatcggggcaagcaggggcgaaatcttgggcaggacattcagcctctctgagcctcagtttccttctctgggaaatgggaataacagccttgcctcacaggcatattaggggattcgaggccaaataaataaagcacctggaaaaggctggtggctagcgttatgtttatgagcaggtgtttataaagtgcctactatgtgcctggcactgtgctgggcactcagactcaaagaacaagacagagaagccctggagacacagtcttctgggggagaaggtggtaaagacaatcccaatacactaatgtcaggccacgatggggtactggggccctgcagagaaacagagagagcagggtccctgggggagaacaaatgtccaggcccaggctctgcccctgtgacggctcccgggatctggggaaatctgtgagtgccaggcccacctctggggctcctatcccctcctgcatgtttgatgccccccttctgaaggtggggctgtcatagcccttcacaatccaaccacagatctgcagcttctgccttgatgatggggtgaaacattctgtgcattgggcagggtgggtgtggacgaactgtgagtccctccatgagtcccatagctgggtctccagtccagcccaggcacatgtcctcagcagcctgggcccacttggggtgcctgttctgcacaaacaaggagcccggactcctgtgtgagtctcaggaaacccacaagaggggctcccattgcccccaccccaggaatgtgagcaggaagctggtgcctccagggaaggctgcggaccccagggggttgtgggagaaagagtgggcctctctcagggatgtttcttcaaatggtcactacagctcagggtgaggacgggcctctgtccagctcagttatcccctcagctctgtgcatggggggagacctgcctggctctgttccctctgttcccctcatctccccaaaacctgggttgccacaagagacccacactgcataaaggctgagggactgttttcagtccctcaggtcccctcggggcaggcactatctcttggggtcaggaccggtgtctcctccttcccctggcaggatgtcctgcagggagatggatgtagtgggggacactcatctccccctggacatgctaccaggtcagcccctgcaagggggatccagaggtaggctaccactggcatggacctggcctgagaatcatatgtgtgtgtccatcactcaagaccaggtgtggcagctccaagggcaaccacagatctgcagcttctgccttgatgacagggtggaacattctgtgcagtgggcagggagtgtgtggatgaactgtgagtccctccatgagtcccatagctgggtccccagtccaccccaggcacatgtccccagcagcctgggcccacttggggtgcctggacagacaaagccgctcaagtctccccaccatcccctggctcagctgtctgggcacaccggggggctcccccattctggcatcctgagccccccacccactcactttgtggagaagggtttcttccccagcagaggggcacagtctggggccgtctctggtcctccccacactctgacccctcctcacttgtcccatcagtaattgtggaccccaggatctacagaggggagagagagccctgcctggaacctgaggtggggcaggaggtggggctgggctcctcttcccggcacggaagcggggcccactcccctcccgtgcctgtctccactattgaccccctaggctccgggacaagggctgagtcactgctccttggagcctcagtgtccccatccacacaacgaggtgccttcccccaggccctccctgcttcctgggactattcagataaacgaagtcaccctccggaatgagccatctgcagcccagggctggttcttctggttgtggcgggatgtgtggtgggggcctggtgcaaacagtgcctccctcctgccctccatggcgccacatttgctgccagacaacagggagacgtcagcctctgatggagcagagcctgcccttgctttcagtcgtgcagatgccgctgcaggtgcgagtccccgactccaggcagccatctcccctgcagagagaaactctctcccaggatgtcttagctccaaggtccagggagggcctgtgaccagcccaaagtcacccataccccagtggtcagtacccacccccatccctggcctctgccagtcccaaacccccaccaacccaggctcagagggctctggtcactcccattttcctcaggcctgggcccaacccccagcctccaggcacgaggagagagagggtgtttgggggccctggtctgattccgcagcagcagagacaccgcaggtccagcagtgatgaggtggaggcaacctcctcctcccacgaaccccctgcttgaagaaaaccaggaaagcaggccaacccgcctggcagtttccggatttactagaaggaagatttccaggtgtcaggctcatctcccacagactgttccccacagccacgtttgctgccaccagcaagagctggggttggtcagctcagagggtgccgggagtggctggagcaggactgttccttctcattttcccaggaggcagtttctaccctccctcacgccacccctgtccctagtggggaaccaaagaggacccagactgccagggagagtggcactgctccctgggcacagccaccccatctgcagtgcccccccactccaccccgtccccatcccgagcaacagctgaccatgtgaggaagcatccctgagagaggccccaccctttctcccacacctgcctggggtccgtagccttccctgaaaacgccagcctcccactcacattcccagggcggaggcaatgggggcctctcttggggatttcctgagactcacacaggagtctgggccccaaccacccagcctgcctcccccacccaccctccctttgtgcttatcccagcccttgcccacctcctgccccatctaggggtagggcacggcccacaggaccgggaggaacaactgattgagtgagtcatctctgaggattcaggctcccacacctgagatcttcccatccgtttatggatgagaaagcaaggctcagtgaggggaagtgactgcctaacttctcgaggtcacagagctactcacagggcaagcagtggccacctaggaccgcacctgatacaccaactccaccccaggtctagcgcagcctggaccaccccctgaaaatctccagcccttgggagaggcaagcacccccttccaaactctccccagacttactctttatgccggtctaagctgacccctgacctgccaatcaacaacggtgggtctccaagcaccatctcccctcaccctcactccttcccatttcacccttttgtccctagtccccacttcaggggccagaacaaggacacatttcatagctgagtcaacaagctttattgtcatcaggcaaggaagcatggggaagggactgaagcagggggctgaggctggagaggccggagactgtggggcagatggggcggctgcctccctgcctcctgggtggccggccggggtagctgagtcctcagcgggtggtctggtggacctgctcgcgggaggagatgaccttgccatcctggacctcttccacaatggtacgcacctgacgggtggtcaccgctgcaggagaagcaggcaatttaaagtgggtaggggccaggaggccctcgcttgccccctagccctcatggacaggagccggctctctccctcatcctcccccaggtgctgtgagtgcctccactggcacctcgacatcacactgcacacacatccctcctgtccctgccaccacctcccttccatcccatccctctgccggtggccctgtgtgagtcttgcctccccagatgggttatttgattctgatccagtgtgtcctgccagggaggagccatgtagactccatgaaatccgtctccatttctctgcagtctctaggacatagattttctaccatctcccccatcagactgggatcgccaagacaaaaaccaggcccctatctcctccattagactaggaaccctaaggctaggatcatatattctccatcagattggaatttggaggacaaggaccatgtccctatctcccatcaggctacagaccccagagacaggactgtttttgctcatccaaaagctgtcaagagcaaagatcatgagaccatgttcctatcttcccatcagatgacaatctccagagctgggacctgtctcctccatcagactaggatctccaaggtaaggaccagttccctgccccacccccatcagaccagacagtgtctctctcatttgatcttttcctgagtatcaatcctcagtgctaatgagtcacttctccctgctgagggacagccatcaactcctggagctcctggggaccctgccccagcaacgtgcaggtgggctgcctgtcccatgcacccaacccccagggccgaagccacgcagatacttacgttctttcttgtactgagtcaggctgaaagaaaaaaaaaaacagagaggaaattagatgtgggtctgagagccccacccctgccaagagacccccagccctgaccccaggcgcccccactcactgggcatcctctccctccagcaggcggcggtaggtggcaatctcctgctccagccgcgtcttcacatccagcaggattttgtattcctggttctgctgctccatctcgcagcgaagctgggccagctgctcctccacgctgccaatcagcccctggatctgggacagctgcacgcagtagcggttctctgtctccgccaggttgccctccagggatgctttctgcaggagggcaggaagaccaggggtcagtgaggatggtcaatgccctcttctgggccctcccccatgcacaggactgttcctaccatgctgagctgggactgcagctctatctccaaggcctgcatggtgcgccggagctccgagatctcactcttgccactctgcaccagctcactgttggtggccacctcgcggttcagttcctctgtctgcagacaggacacaggacagggcggtgtgagcctggatccctctcccaagtcaggcctcctcccaaatctaactgtggagagagtgtgccttctcaccagcttcccacatcccaaagcccagaaacatgccatttgaaatgttaactttttatggttaatcccagcgtgtgggaggcacagaccggaaacttgagaacaagccagaacatgtagcctggctcttgatgctagttcctgacttcttgagggagacgtggggactcccaaggtctttaccctctgcctttattctgagggagctccctacctccccacccacccgccagatcccagcttgagctcagctccatgtctgttgatgcagtgggtgaccctgtggtccatgcagcttactgaggaggggcacctccaagacatctggccgtgggcttactgtcagtgctaaggcccctgagccccagcccctaagagagccctctggcctgcagcaccccccaccttgctgaagaaccaatcctcggcatccttgcggttcttctctgccatcttctcatactggtcacgcatctcgttgaggatgcggctcaggtccacgcctggggcagcgtccatctccacattgatctcaccacccacctggcctcgcagggcgttcatctcctatggaaaaaggggatgtggatgtgcgcatctggacccatcctgacctctcactcccaagccttcccccacaaggggaccccacttcccacaaggacccctcctttgttctccctctgctctatctgaccctctaaatgatttttattcatctgctcagtattgcctccaccatcagactctatctcccccattagaccaaggactctccaaaataaaatctaattattaggcctatgcccccaaaagttcccctctaatttccaagcttctatgtagatgttcagctttgagagtttgaaatgggacaagatttccttacttatcccccaccctcatgagggaggcagggtaggtagagggagcctctgcaggcccctgggaggttccttgtgtacagagaagcagtgtggtacaaagaggagtctgccctgcacactggaccccaaggatcagggctctgcagacagggaagccctctaaggtgactaatcccggtgcacctgctctgctctctcccacggcctcagccattgcccagccccagggctctgccacccactcctcagcatctttgaccttctgccccagccacctcacctcctcgtggttcttcttcaggtaggccagctcctccttgaggttctcaatctgcatctccaggtcggctctggccagggtcagctcatccagcaccctgcgcaggccattgatgtcggcctccacactcaggcgcagggcctgctctgtctcaaacctgccgtgggaatcagagacttcagcccaggctgcttggacctgcagatccaggtcctggctgctcacctgccttcattttgccaggactctaaggagttggaagggctgatgagagggtcgagtggaaacgaattccagccccgggaccccgggaccatcacagggccagatcccacgcccaccagcttccttacttctctctgcctcccgcctcccgcctcccctccttctcttctattccctgcctaagctcagcaaccttcagaactggctgccttcactgcatcctggactaaggagtggggctcctaggactgccccaccctgagctcctgggccttgccacaagcaaccaaggaatcctggggtcaggaggggtaccctgagatcctccgccagctggcccaggctgcccaaggccacagctaggactcacttggtgcggaagtcatcagcagccagacgggcattgtcaatctgtagcaggatgttggcattgtccacggtggctgtgaggatctgaggagaagggagagtagtcaggtcattggatgggggtggctgagcccacaccagggttctgagcagatcttcctgcctcagggcctctcttctcgcccagcccctcccttgccccgtgctgtattattggcagaggaggggcaaacaggagtctgaagggctgaaaggtgcctcttcttcccccgatactcagtaccccaccagacccccatggcaggctcggccttaaaggagaagagacagctggctgggagtatgaggcaaccagaaaagaatgggaaaatgtccccagggcagaagctgtcccagaattctagaacaagggaggggatgtgggcaaccccctcgttttacagtcagctagagggtgcccctgacaggctcccccaaaaggaggctaaaggagccctcattaaagagtggttccaaatcaaaagtcaggacccctcctaatccctaaccctgggcgccagccagcagccccgccccctggggtttgctgagcccgtcttaagggacagcaggaggaaaggagaagccagaaaaatccccaaataaggcacatcagaggccttccccacactgaggtcccgccccctcctttctgcctcctcctgcagcaggtgctatcaggagctcactcagacacccccactccacatcacccaaaaccccctcctgttgacccctgctccaaaggagcaagacaccacacatccagcagcccacgggcccagccctccatctgcatcctcctgcctcatcctacaacctctccaggtggcggagctccacgagggagaaactgaggctccaaggggctccacaaggcctctttgttcctgactcagcttgctgtccccagaaaagggggatgtgagccacacaggggccccaaggcaggttcccagaagctaagccacagccaaaccacccttggctccctgagaccctatggctggactccaggcctttggccaaggcaggagttggggggaagaagtcatgccccccggagacccctcccaccagcaggccctaccttgttctgcagctcctcaattgtcctgtagtactggctgtagtcacgggcgggccccggggcctgcctctggtaccagtcacggatcttcacctccagctcagtgttggcctcctccagggcacgcaccttgtccaggtaggaggccaggcggtcattgaggttctgcatggtggccttctcacctccagccagcagcccatcaacacccccaaagctgctgccatagccaccaccagagccaaagctgtagcagctggagtagctgctacccccgagggtgctgcccaggccgccagcagatcccagcctgcaggagccggcacccaggccgccagacagccggcaggaggtgcgggacgagccgccccccaggccggaggagcccttgatggagctggaggaggtgaactggcggatggaggtggtcatggtggcggcggcaggaggcaggcacacaggagaagggctggagaggagaggggccccaagttgtgtagggctgccggggttcgcccgcttcctttataggccaccaagtgggcgtagcgattacaacaggcttgctcctctgtttccattcccctgggctttcatcaccactggccacctgccagctcccaggtggctgggggccccctccccgcccatcatcaggaatttgcctcatttctccaaatcctcgtgctgagtgccgtgcgtgtgcgtgcctctggtctcaggcccgtcacctgtgattcaggcgggccctccagctatgctttcccatgacctaatacggagaagaggagaaggcaggacgtcaccgtccccaggccctcccaggcagccaccaccccagcctggcccgcctcaaccctgtctggtggggaaatgggttgcagtgtcagctgacccccccgccaaagttgctgtctttcaccccacactgctccacccacggtgctggccccggggctgggtgctgaagagaaagaggagaccgagagcctatcctgccttggaaactgagcccaaacccaccaggcccacctcacagcatagaaatgccatcaagcctcggagaccaacccacatcacagataaagaaattggggctccagaggggtgccgtgtccacactggccccttctgcagagcctgacacccaggaatgcactctaggggctacagttccatccagtcagcttctgaccctgccccatccctagaaatccttgctaacccagtctcttcgtgtaaacctttccccaggtttacactccaggctggggtgggcaaacaggggctcagctataggatggggaaatggtgggctgtgccaactgagagggggatgcccccttccactcccctcacccttctgtaccccaagagacctcagggtcaggtgacgggtatttatctcaggtctcagcccacaggaaacctaaaggacattgcccaagaagaggctcttacagagaccccagccagcccccttcccactccaggctccccaagatgtggctcctcaggtgggccatgtgccccaccccacagccccaccctgccctgcccaccaccccaagcccggccctgggtcccagggtcccgccaggcccgctgggtggaatgtggtcatgtttcagactgccgatggcttccacttcccagacaggcccagacggccccgccagcagccgagagacattcctcaatagcccagtggctgccaagccaccaaagcaaacaggatgccccctacgcgtacacgcacagcggccaccccgccccacacacaccccgagctggggcagagccggtctggtttcctgggctggctgcgtcactgccatgccctctcactcatcaatgccatggaccactccttcagaagcccctccccaccaagcccctctccttctgctcttgaacccgccctgggctgaggcagggagtgctccccaacaggcaccatccttggaaagtctgtgtggccctcccagggaccagccacaggtgacagggactcaggggctgattcttagaaacttttcccaatacaaggggctgtcccatccctccacccttaatctttccgcctcctcccctctcatctttccaggagccccaggcctggatggagtgggcagaacagattggcaggtgacaagcccatacccaaacactcaataaactccacctcccccagtccctcagcccacactgccccaaaccaatgagcagatcagatcacacgaggcattgaacttggagcaaagctttaatagtaggcactggacaaacccaggaggcctcctcagtgaggggctgcagaaagtagatacagaaagacaacaggccatgcaccggggcccagacggacactcggggcgtggcagtagcatgctgggagctggagctgatggctgtgccgtggccctcgaggtggggctgtcgcagacagaaaggggtctcagtgggtggagaagtggacctgctcacagaagaagaccacctctccaacctggacttcctccacgatggcacacctggtggctggtcactgtggctgcaggcgatggaggagggaggcacagggaacatcaggcaggagctcttccccccgcctgcccccgcgtctgtggtccccccagtctcccacacagaagggtcctcagcctctcccctgccttggggtccacaccgcaggacagggcagcttcttaccttcccgggtgggctgcgaggccagggacaaggagtactgagtggccagcctgcagggagagaagcacccatcagcccagggatgccagccagcccaggcacctgcaagcactgctggggagaagtaggccctggcagaggaggttcccctaaattggtgaaaaatcacagttgggaatgcacagaaattagcgcaggcccaagaatgaaagggcaggggttcagcacagcaggaagaagaaaaagaaacagcacagcagtaggtctggcggcactctgtggctactcaccaggaatttacaaggagaagctgagcaagtggtttttccataacccagagggcccaacaaatagacccaattaaagcaggagagactgttgttagactatagatggacttcaccatttccggggagcaaaaagctgcaacgtgtgactaagcatggagactccgggacactctcagctgaaggcctgatcacccttcccaactgcaaacccaaccaccacccaccttgctcttcaccactcacacagtcatcagaaccagaaacccagggccatcaatgcctgctccttcatgtgttctcccgacacttactgagtcctgactgtgagccatgcttaccccgagatccaggcatccagtcccgctgttttgagctataacctctcttctgcgtgcaccaccttccttcccctgccccactacccaccaccgcacgggacttctctggccagactccctgctccagccccctgacacatctctctggccccgccctgacccctctgatccatttctccctctgcagccagagtgaatgttctaaaatctcttgatgttcatttcactctcctgctccaaatccctccatggctccccattgcctacgtgatctagtccagacgctttaacttggcattcaaggctcctcagccagactccagcctgcatcgtcagtatcacctcctgcaaaccccaacaggttccgacattcacacctcctgaatttcgctggtgctcagacaccaacttctccctgggtgaagcgggcccccagcccaccccaacaggcaccctggtacacactcactgggcgtcctcaacctccagcaagcggcggtaggtggcgatctcctgctccagccacgtcttcacgtccagaaggacctgtgcttgtggtcctggtgctccgtgtcgcagcagagctcgcacagctgctgctccatgcttctgttaagcccctgcagctgggccggcagggtcctgtaacacacctccatctccaccaggctgccctccagcgatgctttctgtgggccaagagataggtggtgtgatgagctggacctgggacccttccccatggcagagcactagagaggagcccctcctgtatggggctgtgggtgctgccagcacaatgaggtggtagtgcacccagccactgagtgtgaagggacaggctgggtggggactctggttccccaagcaggggtctacaaggctgggctcaccctggggtgacaggtacagggtggggaggggacagagaccctaccttgctgagctgggacggctcaggttctgcacagagacgtagagctccatatctctatccagccactctgcagggcctctgtgttggtggccacctcgcagttcagcccctctttctggaaggcagagtgggccacaggggtttatggagactttcagaagcggggcacaggaaagggctgctcctgaaccctcacctcccagaaccatcccctagcccctccctggcctctatggggccccaaaggcacctgcacacagagagcctctgcacccacattggaacttggaggaattcagcctgctctgcggtcatttgcatttctttttcctactgaactgcagcacctcaaagacaggcactgggtgttattcttttgcgcctgttgctgtccctaggataccggagatactcagcctgtgcttgccaagggtatacatatgtattcaaatacgcacatcctgtaaacagctgtggtggaaacccaagaccagacttgtagagacctggatctattttgcaggccacagtgaagggctgtgtgagcttgagtcctctctgagcctcacgttttacatctaaaacatgaggggctggtccaactggtttccaaaagtccttccaactgggacagcctgtggatctgccagtgctccagctgcaccagcatgcagcacatgtgcccacacgtgtacacacctgcttacgcacggccacccaccatgctgaagaaccagccctcggcatccttgcagctcttctccaccaatgtcttgtcctggtcacgcatctcattcaggatgcagctcaggttcactccaggcacagtgtccatcttcacactgacatcctcatccacctgacctcaaaggacgttcatttcctgggcagagaggacagcagaagctcacccaaggccatcctggagaaagaccctggggcctgccttctttccctcggagagacaggtacagatgacagacagacagacacagataggccaacagctcctcaccctgaaggtggaggtggatgttgtcatttctcaaacatacagggctgtgaatattagcaacctcccccaacacacaccgtgacgcgggactggaattcacccatccccaacaagtgctaagccccgagagatgacaaccccccagcacggtggaggatgaccacgggcgacctcactcactgccctgaccttgcccccaccactgccttgcccccaccaccaagcccacagcacaggcatgcagaaagcaaccctacgctgtgtcactgcgccaggccccgttagcaaatgttaatctgctggaggaaagcaattgtataaccagcctcaaagccagggggaaacaccttccgggtgtcctgcttctcggggagtaggctcccccagctcagagcagcacagagctcggctgagaaggaagacacaggacagggcatgtaaggcctcctgactgccccacaggaccttggatctctatccttgggttgagctttggagtccctgcgacctagagccttctggaaaggagaggcaggagagggggcagagaggtggggtggatacgagtccaacagacctgaaggagggtccctgtgcagccatagataaatcccttaacctctctgagcctccgtttcttcaaaggtcaaaaggaagtaagagtatctttctcccagctgttgtatcagctgagataatggctgtgagtcacttgtagtgctgggcagaagttccttgttttaatgactatcactattataattaattataacaagcattgtgttaattataactagcattgtgtgttcttaaactgagttactcattagttagttaactgcagtgagctgagcctcaagggacaaatgaagtctatttgggacgaggggctcctccaggcctcacgcagtgtcctctgagggtcagggctagtcatccataaaagacgggaactggactgaaagcacagcccagcccagggaggttctgggccccagcctcgcttgcttccaggtgaatttctgctgcgttccctgagctgacctcacctgcttgtggttcttcttcaggtagaccaggtcctccttgaggttctcaatctgcatctccaggttggccccggccagggtcagcttgtccagcccctggggcagctccagagacccagcctcacttggtgcagaggtcatcggcagccaggtgggcatcatccacctgtagccagcacgaagctggaattaccgaccacagccaccaggatctgggagagacggggtctccatgagaaaatgcccttggcagcctccaggagaccctccaacacccttcttgcaggcttttcggaagtgagccagggtgagggtgatgagagtccccatggtcttctctgagcacccccctgggaacttctggggagccagggtgagggtgatgagagtccccgtggtcttctctgagcaccctcctgggaatttctggggagccagggtgagggtgatgagagtccccgtggtcttctctgagcaccctcctgggaatttctggggagccagggtgagggtgatgagagtccccgtggtcttctctgagcaccctcctgggaatttctggggagccagggtgagggtgatgagagtccccgtggtcttctctgagcaccctcctgggaatttctgggacccagccaaggccctcagggggttaaaggatgatgggggtaggatgcccaggcatgggtaaacatggatgccaggagagagacccttatgcagctgtctcccaccatgggggtcatggcctaagctgcctaggcctcactccctcttccccaactaaattcacctctaggctcagctgccacctcctccagaaagccctcttggattccctttctgcgtctcttttccagatcatacctcctcccttctccaggttgtgaatttatacctatttctatgacttttttggttatttcctcctccactggactctgagctccagggagacaaggccatgtctgtttcattctctttggaatccccagccctgggcacagtgccctggcccagagttggccccaagggttcgttagtttaattaagtgatttgttaattaattaatgaggttatgactggcctcacctcaaacccagggcaaagctttcttttcccacaaggtcatctgggcggttccaatgcaaacacggagggaggggcccagaaggagcagaaggttggttgtgattactgccgctgtcattggcatggttggaaatgcccaagagggtttccaattgaggccatgggcatgcaccaaagagtgaggcccctccagccacccagaggttgaaacacttgtgaaggcggcacatgagcgtgtagaatctggaatttgctgaggctcagggctgactgcacatgaccttagagggataagccccaggacaccctagtagaccctgcaggctcatcctgtgcaccccctccccaagaccccactcgaggccctaagttctgtgaagtgaccctgggtcaagctgagctgagggccagtttgttcccagcaccccctcctctgcctcagtgggcccatctgcatccggcagagacccacccagcccccatctccttgctcgggaggctttgggggcacagcgagggtcggctgtgaaaacacggagagaatgcgtgtagggtgactcgaggcacagccctggtgcgtgctgcgcggcggggttggtgatgaggtgctggctgatcccgaagatcaggagcactgactcaccagggctcccctgggttccccgctgccagaaccaaccccaatatctgatctggcactgccagtatttctgcttccaaggggagattgcaggaattcccgcctagtggaggtcccgggcaggagcagacaaagcccctcgtaggcagcaccaggcctggctctccacccaggaaactgagcaggcctaaccaccagggccagctgggcctaacctgactcccgcctgcctcccctggctcccctggcccccctggccaccatactcatcacttgcactcctcacctgccactggtggctttgctctgtaggaccctccagggcagggtttgtgcagaagacaaagtggccatgtttacagaatgccaaagccatgttcttagaggtcatgagagagagtgtgtgtgtatgtgtgtgtgtgtgtggtgtgtgatgtgtgtgtggtgtgtggtgtgtgatgtgtgtggtgtttatgtgtatgtagtatgtgtgtatgtggtgtgtgtggtgtgtggtatgcatgtggtgtggtgtatatgtgtgtgtggtgtgtatgtgtgtgtgagatctgtgtgtattgtgtgtgtggtgtgtatatgcgtgtggtgtgtgtggtgtgtggtacatgggtggttgtgggtatatatgtgtatggtgtgtgtgtagtgtgtatgtgtgtggtgcgtgtggaatatgtgtggcatgtgtggtgtggggtgtgtgtgtggtgtctgtgtgtatgtgtatgtgtgtgtggtgtgtgtggtgagtgtgtgtgtgatgtatctatggtgtgtatggtgagtatgtgtgtggtgtgtgtggtgtttgtgtatgtgtgtgatgtgtttggagtgtgtgtgtggtgtttgcgtgtgtctgtgatgtatatgtggtgtgtgcgtgatgtgtgtgtggcgtgtatgtgtgtatgtgtatggtctgtgtggtgtttgtgtgtgtatatgtgtgtgatgtgtgtgtgctgtgtgtctctgatgtgtgtggtgtgtgtgtggtgtgtgtgcgtgtacgtgcgcgtgtatgtgtggtgtgtgtggtgtgtatgtgtgtgatgtttgtgtagtgtgtgatgtgtatgagtgtgtgtgtggtgtgtggtatgtttgggtgggtgtgtatatgtgttggagagggtgtggggggtttgggggggtgtgtgactaatatgtgtggagggggtgttgggggtgtggtgggtatatgtgtaggtgtgtggtatgtgtgtgtgtatgtagtatgtgtgtatgtggatgtgcctgtgagctatgtgtgaatgtgtatataggagtcttttagtgtgtgtgtatcgatcggtgggcatgcgcctgtgtgtgaatctgggagtgtgaggtgtgagtggggcgcgtggcgtttggggtagtgtgtgatgtgtatggtgtgtggtgtttgtgtgtgtgtacgtgtgtgctgtgtgtggtgtgtgtgtggtgtttctgtgtgtgtatgtgtgtgatgtgtgtggggtgtgtgtggtgtttgtgtgtgtacgtgtgtggtgtgtgtgtggtgtttgtgtgtatgtgtgtgatggtgtgtgtggtgtgtgtggtgtttgtgtgtgtgtatgtgtgtgtgtggttgtgtgtggtgtttgtgtgtatgtgtgtgctgtgtgtgtggtcagtaaggttctgcatggtcttttcaccgcccccgcagcagggcatccgccacgtcaacgctggagccaaagcccccacccaggttacaggtgtagccaccgctgtagcctcccccaagtcccaccaagaagcaggaggaggtgaccgacatgttgccacagctgctgactcccaggaggctggcgaaaggcacccccaacactgacagatgacatccaggagaaacccccgccaggtgtccacaggcccttgacagagccagaggtggagaactggcagatgctggtagtggtgacaaccagggtgtccatgggtcgggtgaagagtctggtctggatggagaccctgggtagcccgttacagccgggctgaagtggggctgggaccctggcccttgaagttcaggccaaaaccccaggagtgtattttgcctcctcccacccacccagggcctggggctcaggctggacatattgagagcctccccaaggacccctccatagcaagagcccagcctgagcaccagggcctcagcggtctgttcagacacaaaggtggtggccaggcacggtggctcacgcctgtaatcccagcactttgagaggcagaggcaggtgaaccacctgaggtcaggagtttgagaccagactggccaacatagcaaaaccccatctctactaaaaatacaaaaattagctgggcgtggtgtcacgaacctgtaatcccagctactcaggaggctgaggcaggagaatagcttgaacctgggaggtggaggttgcagtgagccgagatcacaccattgcactccagcctgggcaacaagagtaaaaatctgtctcaaaaaagaaagaaagaaacaaaggtggtgctggtctgtagccctggggtagggtgaccctccatcctcagccacagttaggaggctgagcttattcttgtggggagcccggagaacccagccctgggagccagcacgggcacaggacaaggctgcacaggccaggagccggaggctggcctggcccctcacccagcattccagggccctggggtaagggtggagagatcggggcctgacatcattgcccaggtacaacgtggccctggtggagactcccagtcagaggaggcagaattagcctctgacctgtgggagccccactctcttgggattcttccaagtccgcggggagatacagcccacaggttcaaggatccctgtgtctgagggaaatagacgtggccgctgaactgagggagctttggatccaagcctttcaggaagtcagttctagagcctccgttccctcgtttgtaaaagggggaccaagtcttgtctcccaaagtctttgagggaatctggagagataatgacgtcagtaaggctctaacaaaacaggaagcagaggtggggctgggagcaggggtctgaggccaaagggttagggcagcctccctcctcacccgaacctgagcaatgtcagtccagagcagtcccggaggaggggagggcagcccaggaaggccacagaggagcaggatctgtgcaggagccagcgtcatgccccgaggaacggcccctgcaaaagagcagcatgatccgcaggctggtggctggcaccgctccacccaacaaggagattagtatcctaatctccgcggcactaatgatttaggtgctgccaggacaccggcgtctgcaccaggcctgtctgaatgtggagcttcccagggcagccagggcccgcggaacaggagaggggagagaagtgcatgggtggcctgggctctctgcccgcatacggggacagggagggagttgggttttccatgtggcccagagctcccagatgagaccacactgctggaaagacttcctgctcagatagtgggtggtctctcacggaaagtgccagctggggactgtgccagctgggaatggcaggagctatctggaagagagcggttgagccctgattttactgctcccgcccagcctgtgaaggtgctgggcggggatggggggaggttcaaaaccaaggctagagagcaaggtcagaccaccatgagcacgaggttagacatctggaaggacttcctggcaatccaggactgtcttcggggaggagagagacccagtaaaacccgtgctcacctgagccgccagagtcaagactgcaccagcaggcactcacacacgaagagacacgaaaccaagaccctccccatccccatcctctcctaacaacccctcccttcccaggccccatcctcccctaggccagctgggctacccaggtgggcctcactctgggctcacaaaagggactgccccgccttccagcagcaaatgtggggcaaagccagggccctagggagggggccaggtcgtggggtgccaccacccctctgcctccccgtagagcccacaccgccagtgctcaccctgcctgggaaccccacttccagagtacccagaccttagtcttgaggcccaatttgaaggagcagagagtttattactcttctttctgcctctaaaatcaccaaggcctccaacccccaataccaccatttagcccccacaagcttcctcacccctgacaggctttgggccgcgagcctgctcctcttcctctctgggcctcagtttccccacgccactgaccccccccccaggcccctttgctactgctcgttagaggctctactgcctgtgaatccccctctagcccccaacccagagaagcctcacatgctgaggacaggccgggccagctgggccagccgggcaggagggcacagctcagatctcagcagagatagaagtgggaccccaggaaggcctccctggccctccagagcgtggggccactccctggccagggctaggaaaatgcaaacattcctcctgagaccctcacaacagtgccttgaggacaccaagacacagggtgcttgagcagcgggcagtcgggcaacccaatgttggcatcagagccgggcctgaagccagggcctcggcagctcccactctcccagccagggaggaaggcttgacaggggccggctggagggccacacagaggtcctctgggctgtggcacatcctgtctgggcctgtcctccacccccagcagggagagatccctggcacccgcaaggggcagcccaggcctgcagccccggcagcggcagcagcttggcccccatggaagacaaaggggtaaagaaggagaggtccaatggctcttccagccccagaggctgctggagcccagcgcaggtgggagagggggaggcccagggaggtggctgggagaacttgaagcttcccccagtgccctgggtgccagccccaccttgactccccctcagtctcctctgcagagagtgcagaaaagccagcatgctggagagcgcagcacagacaggacctgcctggaatttgagcagagctagggtttggggacagtgtcccctaatatcacccctactatgttgtggggaggcagagggcgtagaatgatctggggccctatggaaaggagatgttcaatagatgcatttttttttactttaaatagagatggggtctcactatattacccaggctggtctcaggctcctgggctcaagcagtcctcctgcctctgcctcccaaagtgctgggattataggagtgagtcaccacgcccagccaatagatgcatattgatattgacaaggttgacaaggtctggacaggatcagtggctcacacctgtaatcccaacactttgggaggccgaggcaggcagatcacttgaggtcaggaatttgagaccagcctggccaacatggtgaaaccccgactctactgaaaatacaaaaataagccaggcgtggtagtacctgtaatcccaggtagtcaggaggctgaggcaggagaatcgcttgaacccgggaggtggaggttgcagtgagctgagatcgtcccacagccctccagcctgggcaacagagcgaggctccatctcaaaaaaacaaaagaaaaaacaaaaagacaaggtcatgccccgtctgcccagctggccttggctcctacgagcccccgcaaggattaactgtcaacccttaggatggtgcccaccccataccccacacccctgcccagaaccagcgcgggctgtatgcagcaggtgctctgtgagtgcttgctgaattgttagggtcatggagcctgagcagtgactggggaggagacaaggtcccaggaaagggacatggccacctacccttcccctcaaggaaaagggtcagtatcaggtggtcagggaaagtgagaggccctggagcccagaacgggctcccagctgagaccttggcttcgctgatgaggagagaaccccagagaccctcattccacccctagtcccctgtcactaagacccactggggtcctttccattcacccctcagacacagagcccctgtcacctgcagggcccttggaggtcacagatctcctgcccctcgctcacccccaggcactcccacccctggcccagcatcgcctgagaagtgcaccctcacccagccacacctgccgcctccacaggtggaatcctgcttcctctattctgtttcctgcctctatcctgaggccccaggcggccccacccagatcctcccaccctccaccttcccagggccctgggagattcggaacattgctgggtgccctgagcctctgccccagtttgaagagacagaggtaaggggatcccccagcaccccctgtatacccagggcttggccaggggctcccctacccaggggtaagtggacccagcctttcttcccctctgcacccctcactcacctctgactggtttccaggaactgtcagcctgtggcggatccaagacgtaggatacggacacccaggaacaccccacccttccaggcagcacatcagctgtccaggggcccttcccaaaagagggcctagaggactgaatgcctcggatgaggcccagggcgggaggacagagcaagggagggagggagggaaggctggggaccagtgggaatgagtggggaggacatcacggacaggaaacccaggcctcgggggtcacccgtgggacacctcactgcctctcacagggtgaagactcctgtgagaggagtcttgaccagacggcttcgtccctctgtccttccctctgtctttccctccctctgcccttccctccctctttttcctccctcttttcacttcccccaccgcttccttggcctgagagatgcataggggtgagtgagaggcagaaactccagtgggttcccctttcaggctcacaccccctctccactctgccctgcagcctggctgagggcaacctgagggcctggggaaatgggagtcagagacaccaaggggactccaggctccttcccaccctgcagaccccaaacccccagctgcacctccctccccgacccagctaccagctcgctcctccctccctgcgccctggggaggctggtttctccctgttgatgagcgctcattcgcgcctgctctgcaatgctcttgagtggctttctccaggggcagatgaggccaggctccccaaaacagagactgtgtctcttcccttaaattggacacttcctcaaggtagcagccatgtctccccctcagattgggggctcccttgacataggagctctttctccctgatgtgaagggggtctctcaactccttgtcctggtgttgaccacccagcccaccacagtgtgacacacctgactgaccaacaagggaggagaagcagggcagggagcactgagggaggaggaccagggcagggaggactgctggaggaggaagaggggacggaggactaggtaggtaagaccagcggaaggaggaccaggggaagggcatgaggagagggaggactagggtaggaagaccaggggaaagaggaccaggggaggaggactgggggagggaggaccagcagaggaagggctatgggagaagaaccaagggagagaggactaggggagggaggaccagggaacgaggaccagagcaagccatcatctatcctttccaagggcaaaacaggagaacagggcaggagcattcctttgcagaggcctgggctccatggagtgttctgcctgagccccagcccgccatacaggcctgcttcctccatccaggaagctgagctgccctccagccagccaggagcaagctccctccactaaactcctgcagcactgtggtccctgccatctctgcctcagaacccagggtccctgggagccttgttattgagtgtttctggttgacgcacttttttcagcaaagtttcatggagagggaccagagtttctaatcttcacaaccacagggtcaggcattgtgttagctatgatcacactctatgatgtcatgcaaagagctccaagtccaagaacctggggtcaaatctggactcttgcccaacttgggcaagtcatttttcttcttttaggctcaaaccctcctcctctgcagaatgaaaggactagacttttttttttttttttgagacggagtttcactcttgttgcccaggctggagtgcaatggcttgatctcggctcactgcaacctccgcctcctgggttcaagcgactctcctgcctcagtctccagagtagctgggattacaagtgcccaccaccgcgcccagctaattttttctatttttagtagagactgggtttcaccatgttggccaggctggtctcaaactcctgacctcaggcgatccacccacctcagcctcccaaagtgctgggattatgggtgtgagccaccaagcccagccaggactagacttttgtaacaaactcttcatgagattaaatgagtcaatatgtagctgtcacaggccttgtagtaactagtgattcaataaagcttcggtgactccaaaagctggctgggcaaagcctccctgccatgagaagtcatcctgccctgcctgtggtaggcagaataataaaccccaaatatgctgggtgcgatggctcaagcctgtaatctcagcactttgggaggccgaggtgggcagatcacgaggtcaggagatggagaccatcctggctaacacagtgaaaccctgtctctactaaaaacacaaaaaattagccgggcgtggtggcgggtgcctgtggtcccagctactggggaggctgaggcaggacaatggtgtgaacctgggaggcggagcttgcagtaaaccaagatcgatcgcgccactgcactccagcctgggcgacagagcgagactccgtctcaaaaaataaaagctaaaaaataataaaccccaaatatgtccatatctgaatccccagaacctggaaatatgcaccttatagggcaaaaaggactttgcggatgtgaggctgtggttcacaagggatcttaacaggaaggagacaggagtcaatgcccgagaaggagacataaccagagaagcagaggtcagactgacgcgcggccctgagccaaggagtgcggcagcctccagaagccgaaaaaggcaaggaacaagtctctcctggagcctgcagaaggaacacagccctgctgacacctcagtcttagcaccctaagacccatgttggacctctggcttcagaattgtaagaggataaatgtgtgttgctttaatcccccaagtttttgataatttgttacagcagtaatggaaaatgaacgcactcccctagctcattctagcaccagaggtgctagcctctcacactcgtgttagaattattgggaggcggggccaggcgcagtggctcacgcctgtaatcccagcactttgggaggctgagccaggtggatcacctgaggtcaggagttcaagaccagcctggccaacatggtgaaaccccatctttactaaaaatactaaaattagccaggtgtgggccgggcgcgatgcctcaagcctgtaatcccagcactttgggaggccgaggcaagtggatcacgaggtcaggagatcgagaccatcctggctaacacagtgaaaccccatctctactaaaaaacaaaaaaaaattagccgggcatggtggcgggcgcctgtagtcccagctactcaggagcctgaggcaggagaatggcatgaacctgggaggcggagcttgcagtgagccgagatcgcgccactgcactcctgcctgggagacagagcaagaccccgtctcaaaaaaaaaaaaaaattagccaggtgtgatggcaagagcctgtaatcccagctacttgggaggctgaggcaggagaatcacttgaacccaggaggcggaggttacagtgagctgagattgtgccactgcactccagtctgggcaacaaagcaaaactccatctcaacaacagcaacaaaaaaaaagaattactgagaggcggatctgctccccttctcaattgataatcctttacagccaaaaggtggttttctgttcatctttggacctactacaaggtctgactcagtgcttcgtacacagtagttgccctattgatgcttgctgaatggacgcaggcagtaagagcccagagttggatttcattcagcacctaattgttgggttcattgtgtgcagtcacagagctgggtgctcagaattcagtactgagtcagccaagccctgcccttagtgagagcaggccgtgagtgagacacacacaaaacagttcagtgcagcgcaatgttactcgtgcagtgacaaaggtatgtgtgtacaggcaccttgggaggcccagggagggagcaactcattcagaccaggcctcggaggatagtttcacagggagggacagcaaagctgggtttcgaagccagggcagcactttgccaggctgagaagacaaggtggaaaatcgtccaggtagacacgggaatgcacctggtgtgtttggggaacacccagagacccatagctgcatcagcatttccagggggatgcagtaggagtgctatggaaaatggatcttgcaaagaaacgcatttctttatctcctgttagttgagcacctactctgtgccaggtactgtctcagtctctgggaataaacaccacaaaccacatttttgctctcgtggaacagacattctagcaggagaaatgggcaatcaacaaaccagtggatggtccattctccaaggaaatacaaaggggactatgagtgcttcgagaggctggggaaggcctctcccaggtgacagttaaggggggaactgaactatgtaaagagccagccacgtgcagggaaggacactccaggctgaggtgacagttggtccaagggccctgaggctggaccgaggtattccgttctggggaacagaaagaagagcctgtgtggctggggtggagtgggcaaaggagagagtcaagccacatcaagtcaggaagggacagggctgaccctcagagcagaggttctcatccctgatgtatagggaggttctcatccctgatgcacaggggcctcttaaggcccctgtggtgctcttaagagcagaactgagaaccgtgatccacagccccatgggcctgggagcctcatgtcttcgacagacagtttttgtttgcttgttgcactgcaaacttctcagagcttggaacaagccaatgcacagtgtgatgctgtgtttcccaaattcatatggacatggagccacttccaggagaagcaggtggagctagggttcctgggacaccattttggaaatctctgggccaattcataggtcatacaagtggaagaaatgactgggacaaaggttgaaaaggaagaccaccatgacagggtgctgaagagtttggactttatcctgtattaatagggagtcatccaagcatggttgtgtgctgttttgttcttaatgtgtctatttatatagattttaatcaaacaaaagggatattatcgatatctccaatgcttcggtctcccagttaataatatctcttggaaagccacctcattctttttaatccgtcatgacgatgagctataatttatctacttcgtccctgacaacaacctctctggtctccaaggctttttgcttttccaagcaatagtgtcataaacctccctggatgtaaagcatggtgaacttttgcaaatacatcttcaggggaaagtttagcagtgggatgactgggttaaagggtaaatccttttatacttcgagagccactgccaaattttcttccagagtaaaatgaaatgatacttggagtttgctttaaagtattcttacttcttccataaaaactggcagcgggagagagaagaaatcaaaatggcatcatgttgacaattatcaaaaccgggtgatgggcatatgggagctcattttgctattctctctacttttgtgtacatctggaattttccacagttaaaaaaaaagtcaccttgaaaagttctacaaattatcacttgccctaatcatgactaagaatatctttccccttatacatctactagcaatgacaccatcaaagtttgtttgttgttgttgttttcctttttttatcttttttttttttttttgaaatggagttttgctcttgtcacccaggctggagtgcaatggcatgatctcggctcactgaaacctctgcttcctggattcaagtgattctcctgcctcagcttcccaagtagctgagattacaggcacccaccaccacaccctgctaatttctgtatttttagtagagatggggtttcaccatgctggacagctggtctcgaactcttgacttcaagtgatccacctgcctcagcctcccaaactgctgggatgacaggtgtgagccactgcacccggcctttccttttttttttttttttgagatagggtctcattctgtcaccaagactggagtgcaatggtgtgatcaccactgatggctcactgcagccttgaactcgtaggcccaagtgatcctcccacctcagcctcccgagtagctcagactacacgtgtgtgccaccatacctggctaatttttgcattttttgtagagatgaggtctcacaatgttgcccaggctggtctcaaactgctgggctcaagctatcctcctgccctgacctcccaaagtgttgggattatagctgtgagccaccatgcctggcccttttgtctttcttcatagttgaaacagatctctctgttgcttcagtttccgtttatttaattatgagtaaaattgaacttctgttgtagtttgaatgtatcccccaaagttcatgttttggaaacgtaatctccaatgcaatactgttgagagatgggaccgttaagaggagattaggtcacaaaggcagagattaatggccttatagattaatgccattaccaggggagtgggttagttattgcagttatggagggagtgggttcctgataaaaggatgagtttggtccccttccttctctgtctctctctctccccccactcccctctctacccttccacctcctgccatgggatgctgcagcatgaaggccctcgccagatgcagccccctaaccctggacttcccagcctccagaattctcagaagtaaatctctctactctgttaaatcacccagtctcaagtgttcagttagagcagcacagaacagacaaagaccacatccttccctatatttcgtggttgcttcttgttctccttcttgtttcttaggaactggctgttcctatcctttgcctattcttgtctgcagtcttggccttcctggtttgtgtgagcttttcataaacatgggaagaggccttggcacaggtgttgtgaatgcattttcccagttactttttcattttccaactttgtttttcggtctttctccatacagacaattccctcaggccacattccttccttctttttcctgtgtctgggcatcgagtagtttgaaggagctctcttttgtggcagtgtgaatgctggatagagcagaactggcctcagggctgaagtggtggcctgggagagagttgtgaggtgaggatgggacaccatggccaacagggagccaggcctgagctgggaacagcaggatgactctgcattttctgagctgagtaactgggtgggtgatgatgtcactgactaggatagggaagctaggacaagcggagttcacggaaacacagcaattcccctctatggggcacgtctcaccctatgtggttacacctgcttgtatacctgactccccttctagacatgggacagggaccctgcctccttctctctgtccctggaaatggccatagcaaagagtgcccaataactgcagatatgaataaatgaatgaacaaattaataaatgaatggctccagcactttgggaggccaagacgggcagatcacttgaggccaggagttcgagaacagcctggccaacatggcgaaaccctgactctactaaaaatacaaaaattagccaggtgtggtggcacatgcctgtaatcccagctactcgggaggctgaggcaggagaatcgcttgaacccaggagatggaggttgcagcaagccaagatcacactgctgcactccagactgggagagagagccagactctgtctcaaaaaataaaatatgtccgggtacggtggctcacgcctgtaatcccagcactttgagaggctgaggcgggcagatcataaggtcaggagatcaagaccatcctgaccaacatggtgaaaccccgtctctgctaaaaatacaaaaattagctgggtgtggtgggacgtgcctgtaatcccagctactcaggaggctcaggcacgagaatcacttgaacccaggaggtggaggttgcagtgagccgagatcgtgctactgcactccaggctggcaacagagtaagactccatctgaaaaataataatagtaaataaaaataaaataaaataaatgttgctgggtgcagtggctcacacctgtaatcccagcactttggaaggccgaggcgggtagatcacctgaggtcaggagttcgagaccagcctgaccaacatggagaaaccccgtctctagtaaaaatacaaaaaattagccgggcgtggtagcgtattcctgtaatcccagctactctggaggctgaggcaggagaatcgcttgaacccaggaggcagaggttgcactgagccaagatcacaccattgcactccagcctgggcaacaaaagcgaaactctgtctcaaaaaataataataaaataaaataaattttaatttattttaaataatttaaaatttataaattaaattttataattttatattataaacagatttaattatttaaatataattacaaataaatatataattaaaatttaataattttaaaataaatttaatttaatttaatttaaaaatcaatgagtaaatggcttgagtgtgtggtccctctgtccaggtggagatgctgggaggtggaaggcagaattcacaaccgaagggattttctcctccctagtcgcctcccccagtagttgatggcggctgccacacctcaagccaagcaggggacctggcagtgttcacccgccagctgcgtgaacgcccgtaactctttacggcagaagaccaagggtgcgtctggtcctcagaactgcaggatgcaccggcagcgatggagaagcctccttggatgaggcagggtgaggaaggagaccagacaagcaagtcctcctcccagaggcagggacaggaagcaggagcaaggggccaccagggaagctgcaggggctagaacccagggaactttctagaaaggctagctggccctaacagacccctggcctggaggaagacctccagggcaggttaggcgggccagtcacatctccgggggtgatttaaaaggcaccaccttgggacaaaaggatggaagcattgaccagacaaatgcctgacccggcagcagcagaaaaggatgcatggaaccctgtggggttcccacctcatgaggtcgtctctcctcattcttgtgctcggtggctcccaaggggcaggctctagtgctccccatggagaccccaggcccagccgccttccaaggctcatgccctgttaaacggggacacgctccggccgcccgggatccccaaatctgtagcaggagcgccctctgctggccatcttgggtggcgcctctgcgctgcagtcccgagaggagcccgcgaggccgcgggaggaatgcagggaccctggagacccatcctccacctgcgctctgcaaactactccttctcccccagggtcctggctcctcctcgccatcttcagcttcaccgtctctagtcccttaacagccagagcaccaggccccggctgggccgtgtgtccatgcctctgcctccaggcgcatggacacaacattcccttctgaagctggcctgcgctgtgtatcaccccctatcccccatccctccatctcaaaaaagcccttccctgcctttggcacgtgtccctcccccacgcccacccgctcaagtccctctgttaataaactgctaaccccaaaaccagccttccctccagcttgcccggccccgagtctgagggtccctggagcagacacgctccacccgcggggacctctccctcctgtcaactcctgaggagcggcagcggcttctgggcttcccacgcggggtgtgacaccaacgggggacataatacaaacgaacgagggtaaagtccgtgtgcacacctgtgcatggccacatgcggatgtgcgtccaggcgtgccttgcaggtgtgtgggcagtgactgcgcccacccctctgtcgggtctcgccacgcttagctgggtgggctccttccaacccaggctggggctgagcaggaggaagccgcggcctcgcccccagagggcagcactgagctgttctggcccgactgctgccagactctacccggagaggagtcctgagtttccccgtccagggcctgggggaaggacttcaaatctgtaaaggaaagcaaggaatcaaatcccaaatccaggctagcggttacactgcgggcagagcgcgaggcgcacatcgaagctaaaatgtccaaaattgggcagtggattcacggatgtttgttgtgcttttattctttttttgtttttttcttttttttttttttttttttttttgaggtcgagtttcactcttgtcgcccaggctggagtgaaatggggtgatctcggctcactgcaacctccacctcctgggttcaagcgattctcctgcctcagcctcccaagtagctgggattacaggcgcctgccaccacgcccggctaatttttgtatttttagtagagacagggtttcaccatgttggccaggctggtctcgaactcctgacctcaggtgatccgcccacctcggcctcccaaagtgctgggattactggcgtgagccacagcgcccggcagtgccttcattcttaaatcctacacatattttgtaaatattattttgaatctattcagtattactcttttcaaaataaaggcctccgagccctctctagaatgtggaaagaccactcatcgctcagtggagcaaagtgagcctacaagctccccagatcgcccccagaacccccagaatgcagagggctctgagtgtctctggggttgcctgtggctttggggaaggggagagcctggacccaggcttctttaccgcccggagtcccgggtcagcactcctgcaggataagccacacatcgacacgcagctcacacacacacacacacacttccagattcatacacaggtgcatgctcacaggttgacacacacatgctcaaagactcatacacacacgttcacacatagctcacatgcacatacacacacacattgagactctcagacacacacagactgatacacgtacattcacacacagctcatacgaacatttacactctcaaattcacacacaggcacatgctcacaggctgacacacactcaaagactcatatacacacattcacacacagttcacatgcacactcacactcccagattcacacacaggcgcatgctcacagatcgatacacacacactcaaagactcctatatacacattcacacatagctcacaggcacatccacacacacacattgacactctcagacatgcgcacacacaaagactcacacacacacgttcacacacagctcacacacacactcccagattcacacacaggcgcatgctcacagatacacactcaaagactcatatacacacattcacacacacattgacactctcagacacatgcacacacaaagactcacacacacgttcacacacagctcatacacacactcacactcccagattcacacacaggcacatgctcacaggctgacacacactcaaagactcatacccattcacgtgccgctcacatgtacattcacacacatacactgacattcccagactcacacacaccagcacatgctcacaaacttccccatactcacaaacttccccatactcacactcacactcatagactcatgtccacactgtcacccactcatggacacacgcgcaaactttcacattcacacaacctctcacgggtacacaccttacacactcacacaaagacgccattgccactctggcctgttaatcttacatcctcatcaggaaagaggaggggcttgtatcctccctgattgcaagagagatttctagaatgttcccaggagaccccagtcccaaggtagagggatattcctcctggactggaggaagcagaatcggggccaggactgggcctcagaggaactccccgggcttcctgtacccactcactagctcatcctctcactccccagcccatacgtgggagagcctgacctggggacatgacaggggacacacagcaggccctgatcttggggagctcctggacctcacgagacaccgtggagacctgtgcaggctggcctgtgggagtgcccatgaggggtccctgacccagcctcaaggcaggacaggtggggaaaggatctgagcaggtccagcacagcaggagacacaggagatgccggccttccaggcagggtgatgggcacatgccatggcagggggcaccctcagggaagcatgagatgtcccaggccaggggagctggctggaaaggcagggggtgggggctgggcctggcaaggtgagcaggggcccacctgggagaggcccacctgggagaggccctgcgtgccacacgagggagcggggccttgctcctgaaagccacagggagccctgattaactgcacaggacaggagaggacacagctgctctgcagaggcacacagcttgtacccaaaacctgcaggagggcaggtggtcctcagcctccattccaggagcagagcaggcccaggagcccaccactggtccagggaaaccccccacaggtacagccacgttcttccctgattcatcacaacgaggcccctgtaagtgacagagggtcggtctgtgcagacctggaaacacacggccccaagacctgggatcctgaagaagcagtgccagctcctcccagacagcccgccccagctggcccgctggctccagcccagccaggagcgagggcagtgggggagccccacaggagggaacgggggctcaggaggcctggtggggcagagctgggacagctgggcgaaggggctgggtcctggctccgcgacgagggcccattcctgggtgagggagggtggggcagcccacacattccagctgctgccgctcccgccagccagtaccagcctgttctcgcctgttcccactaggtcccaggctgccctgggcccagctcccagtgccagctcccagaatccttcagggttcagactctaactacagggacgccagtgcgaatgtccagaagaccaccccacagaaacaagtgcctcccccaccaacacacatgcacacacacaccccaccaacacacacacacgcatgcatgcacacacactaccaccaaccaacacacatgcacacacacaaacacacaccctaccaacacacacacacaccaccaacacacgcatgcacacacactaccaccaaccaacacacatgcacacacatacacagacacacaccctaccaacacacatgcacacacatacacacaccccaccaacacacacgcatgcacacacatacacacacatacacacacactgcacacacaccccaacacacatgcatgcacacacacatgaaccccaccaacacacatgaacacacactcacatcccagcaacacatgtctgcacacatgcacacacacacgccatcaacacacatgcacatacacacacacaaagccatcctcaaccacaggacacagacacagagcagggttttcaggagctgaggcacttccttccactgcaggcagcacccagccaggacaaagttctatcctcttgccacaaggccctggacagagaagcagggaaagcagccaaggtccccagagagcccctggaatggggcaccccagagccagccccagggctcagccaaagaaagctggggaagtgaggagctgcccccagaaagaggagccaaggggtctctgccccagcctgggacacctcagccaggcttgcccaccactgctctgcaaggggctaggtggggccagggggctgcacctgctctggtccctgccccccaacccagctgcctggagctcagcctgccgccctcaccgtggaggctacgctagatgcccaggaccagtgtcccaccccatccctcagcctctgctcccacagccctgctgtcacccttcctgtcctccctgcaggacagaattcccacgcccaccctgggcccagggccaggaactgctggttcccaccaaggcttgggaagtgatttctgcagaccaagccaccctgggcccaccctgggcccatcacaggttcccaggaaacagcttggccctacctgctgcgaggcatgacagaggggaccagccctgggctgtgctcagaaatgctgaggcctcagaactgggcaacagggaggcaaggaggtcccccatgggtggttgttggtgtgattgaaatgctggctctaccagtagccctccaggaagaggctaaacagtgagcaaggtccccaaatcccaaacttgaagtttccttccccaatcaccatccaggggccctgccagactcacagacagtgatggagaagctacagcgctaagttggggggtcctgtggtggagaagatgcaggtcccagcacagctcatctcagctcccaacacacatcctcagtctcatggtcacattccatccaccaagaacccagggacattcagctaggcttggtggtgtgcacctgtgatcccagctactcaggaggctggggtgggagaaccgcttgagcccaggagatcaagcctgcacgagctgtgatggcgtcactgcactccaacctgggcgacagagtgaggccctatctcaaaaataacaaaaaaaaattttaattaagtgaaaaacaaaaagcgcccagggacattgggaaagggagttcctacccccactttccaggaaagaaaacagaggcccaaagagaggaagtggattgtgggaagaatttcactgcagtaagtggtgaggactgaccttggccaaccccatatagaccccttccagacccaggtgccagtgcagacagcccagctggggtgtgggggacacagggccaagtggcaaggtgtcagcagcagtccccagagatgggcaccccatgggcacaagtccgcactcacagcctctactccagggccccatctggcacagagctccaagctgcttaggacaaaggcatcccttagaggctggaggcagcaaacagaacgtgtccctctgctgcttcctggccactgcggggccctcaccaccacctcagctctcagaacatccttcattctgcccccagcatctactgagcaatgaccaagaccaaagctccaaaccacagactgcctggggcctcggcctccagctctccaactgcagaggcaagagcagagtgtgaggagggggtgaggagtgggcaccccaattgccctggccactgtgggagcttgggctctagcaggctgatctcccccagcctgcaccccacccagcaaggacatgcaagccaagcagttcccacaccccgttcctggtggctgccagaagcttccttacaaggccccagcgctgagctggctcagctgcaggcgggggcctgggtggggcacagcacacctggctcagccaagcccagacgcaccctgcaagtgaggaatgcggacgccgcccgggctggccctgggaaagctgctgccctcggctcctgcccagccctgactcagcctaggtgggccagggaagctgcagcctcagcagaaccaagtctcccaccccaccctccccgctggcctgcctgggattgaaccaggggacaggtcctggcaggggactgagagtagagacagcaccccctggcctcaggacttgggggaacagcagggactctgtgggacctgcccttctcctgcactgtctggagggtgccagcacagctctgtccgggggggctgcccacagcacattttcccagatgcctgagcctcagtttcctcatccgtaaaagggggctagtgacattcctgcccacagtgcagggctgcagtggtggaggaggttcccgggaagcatttgagaagcaaacagacctcttcctaagaaacagaagcgtctgcctaaccccatgaggccaggtgatcccgtgctccatgcagaagaaacagaagcgtctgcccagccccgtgaggccgggtggtcccgtgctccatgcagagcagggtgactccatcatcctctgtccctggccccaatacggttattccaaactccccaggacaagggctgtgtctccccctccgactaggcggtccctgaaggctcggggcatgtctcccctcagacaagaggcttcccagggacagaaactccatcctccttgctccatcgccccacagtcccatgccctgcactgcggaaaccacaggccagtgaaggccagaaaaactgcccgtcccctcctggcgccaccttaccccagcctccccaggccctgacatccacctccttgcccacccagccagcccccaaacgcgacgctggagtgcctcacggtgcccacccagaccctggggatcaggaggcagagccccccaggtctggcgctggtagaatctcccatccctccctgcctgcaaagaaagggcccactggcctccctccctgagccctcccacagctgggctggccagagagaactttctccctctgctctctttctctgctgtagttcaagcacagaccctctcaccccagccagcccttctccaccttccgggcgcacagtcttaggggtggagcagaggctgaggttgggggcctcacagtcaaaggtgctgagacaacagccccgctgccctgtgctcactcagaagctcctggggaactggagtggaggggaagggtccccaagcccacaggttctggctgcccctgccacgtcccctcccccagccaggcttctcccaactgcggcagggcgtctgggctcaggttggggtgcagcgttggcaggacaaacagtctccagtgttgggtgtttgcctcggttaccaaggagggaggtgaggggcctggctccctgccatgtttgggccccgggctgaaggtgtgggtggcagggaaggtggaggatttgaggtggggaggctcacttcccgctcccagggctcgagggcagggcaagccagctgggactgccagatccctgggcggattcagacctgcatcggccctgcctttctgctggctctgggaaactcagtcaggcaggaggagacgctgggggcggggcagcctcccttgctgctcaaagcagggctgtgggctggaggctgggccccggcaagtcaggtactgccgtgggtgtcccaaccttccgggactgacggcaccacggcctaactcaggccgcccgggagagaggcctaggagcccagctctgggcccatgaatttggacaagtcaccgcccctctctgggccccagtttccccacctatatagtgtcaggagctggcctgtgtagtcccacaggggcctcctttgttttgtcctccctgtcatgagctgggcaggtggatgctgaggggttgaggagttgggcactgagccgggagttgtgacccggccttgaagccctggctggaagggctcagtacacatccaggcggccctactgccctgtctgaggctggcatgcagtgagtgcccggctgagtgcaggagcccagggctgtggtcaggaatggccgggccctttctccctctctcagcaatgatgagagccacagcccaaggaatcccctgctgcctcctgctcccaggtctccatcgcagcctcagcatgaccggctctgagcaggaagtaggggaagcaggacagaggctggcctggcagtcagagagtgcacagcctggctcaggaggctggcaggtcatcaggggcatagagctggccctcgttgatggggcagggatggcttggggagggtggagacgccgaggcttgaattagggggtggggggtgcaggtagggaagaaaggaagaggacttgagattgtgaccaggcagtgccacaaggaacacaggagtgtgggccttccatggggagggaggaaggtgaggccaaaagatggcggggcaggggaagggaccacttgccttgcagcccggccagagagagcgagaatgagcagttcccacaccatgaagacctttgccctggccctgctggtggccctgctgtgcacagagagaccccaaggtctatgctgccaccagtgcttggtggccccagcctggcacaggcatgcctgccccgctgccacatgccccttccctgacagggtctgcgtctcgggatatgagagacacagggagtctgggtccctgtggcatctgggaaagtgagagtggggaacaggctctgcctcctttccctcctgccccaagaatgataccatcatttggaatgtggaggttctggacacctctatgagttccaagctttcttgttgcaagagaggcctctgtaatgcgggggtcctggtggcaggcagcacctgggcccttccttgggactcctgctcagcctgggtcagttcccctctgggccctgctgtgatggcctttcctgtcccccttaccccatggccccctcctctgtccccatgcatagtgtcctcctcagtttgggaccacttcggcactgaccctcgggaattccagtgtggttttgcagccgcgcgttcaggggaaggatgtggtggggcagaggcgggggcttccctgtcaggggactctggcaccgggcgggtccctgcggcagacttggaatccctgcttggactcatcctgttacctgggcccagggccttcaaacccacattccctacatcgccacctccttaaaccacccggcctcagagccaggggccttgccatttgctgttctgaacctggaaccacaggaagaacacaggccaggggcaggagtccagggttccgtcctacccagccattaacttaacacggagccagggccacacaacgcaccactccggaccacctctgttcaagcaaggaagaaacccagggctctggagcccctcaggcctcccacacagggcgagagctcccctgtctcaaggtcaataaacacccctctgcttactcaaaaaaagacagagagagagagagagagagacagcagggtccagtctctgagggccttgcgaccaggctgagacatggaatgggggccagtgaagggcgaaggaaaggactgaaccccagcaggagcgactcagcaccccacacacagacacggtctctgggccctgaccacggctccggacacccccaggaaatgctgagacctagatctctgctttgtgtgctttggataagcgcatgagctaatgccagtctgatccagacctgccctccgaagctgcaaggtggcaaaacagaagaggcctgcccacacaggtgcaccagccaccagaggactgggtgtggggctgggtggccagcagctgagggtcctaggcagggcagcaggagggtcggccctggggcagggagaaccgagggccccttcccccgctactgtgccacttgccgcctgcaaacagggaatcccaggaggccggatcttctcgctttgcacccaggaagctagaactctggatttgtatgggaagcctcctgatgcttcatatttggaaactaattccaaaataacaccctgtgcaggccaaagaaagcaaggcattcagccagccttggagctcatgtgggctgaaggacaatctcactcaggaccccctttacaaaaaagtaaagtgaggcccaggagggatgggcttgcagccagttaggatcaagttgggccgaaactcaggccctgactttcctgtgctctccccaacaaggttcccaccccctcacctgctccaccgtgcagaccccagcccagctgaagagcgccctcacgaaccccacacacacccagcaggcttttgctctgcacacgcctgggtgccgaggtctcccataccctctgactgatctgacctggcagctgcctgaattgttttccccattttacagaaaagggaaattgaggccagagaggcaggccattgcccagagtcctcctctgccaagttctagacagtggggagggggctgtgtgcccgcttacaggtctctgtaactcaggtggcagggaggccccaacttgcagggcagggaggggctggcagggatgaggcagggccaggccaggcaggcccagagccactcagcatgcaggcccagtccagagaagccaggcctctgcctccccctccccaagcctgaagaggaactcagcagggacccagatggcctcaaggccggggatgaaccacagacaagaggaggtgccacccaggctagagagaaccaggggagggcagggcactgaggaccacacggtggccgtgccccacacccactcccacccagggacccttgagtcccacttctagccctgggccacagcaggggcattgtaatgctggccttttgtgtgcttgggggtggcggtagtaaggagaaatgccccctccaggtggtcagtgccccaggcctcctggagcaccccagagatggtgaggtcgaacccatgggttcagcacctgccctgtgccaggtcccatgtcagggggacacaagaattaataggacgtgacacaagaatgaacaggacctggttctgccccgggtggctcacagtccagggggagaggagagtgaataaataaaactcagtcgagttgaaattgaccagggccttcaccgcagacggtgggcagggggaagagaggcaccctggggagggctcccagctgtggaataggcatgggactcttcctggaagttagttctggtctttttccattttttatgcagaaaaatgcacatataattgctgtacaactcagtgaattttcacagactgaacccaactgtgtaaccagcacccagatcacagcacccagatcacaaggttgtcacagggacacaggggaaagggcattccaggaaagggccactgaggagcgaaggcagggaggtgggaactgcccagccccagcaggtacccagagccaggaggatccagcaggcctctctcctcacccaaagaggatgggtgctcaaactccagacctgctccaagaaacatatctgcagccctaaagcccccaacgcccccaacccgctgtcctgtccaccttctccgctccacaatccagcctgcgcctcgtactgcaccagagagatatgctaaccacatgcaaaggtatgcaaatgaacacagactccctgagtcaacttgggcagtagccagagtgagtgaagaaccagacctccaaacaggtgactagaccggcccctgcccctggccccattcctcccaccagctcctgagcaccacagccctgcacccccacaccctcaacccaaagctctgaccacctgcccttcccttcatctattcatttaactttgattctcagggggccaagggccagtccccaaagtgagcaccagagagctgagcacctgcccaccaggagctcacagtgagcagggaaggggaggggatgcagacacggccaccaattcccaggaagagcctgcctcaggacagagcttccaagcctcagaacagcaggtgctgactcagtagtgtgggatctggcccaacactctgcatttcccaccagctcccagcggacgccaaggctgcgggtcccaggccacacccagattagccaggagtaaaggaggtgtgagaaacatggccctaggaacacgaagggctgggggacaggcagggcaggagagtggctaagagatgtgcctggattcaggtcccagctctgcctcctgcccatcgtggccgtgttgcttcccatcccccagcctcagagccctcagccctaaggtaccccctgtaacaactgcccccacgtcaccaggtcccagaggcttcagtgagaccaactggcctagggcccctgtggcacctgacaccctgcaagcacttggtaatcgggagattatttttaagtcagggtcgactgggaagaggcacaagggacgtgtttggggtgaagggaatgttctctgtcttgattatggtggtggtctcttggaagatgtcaaggacaggggattcaccaggaggagggactgcaagagcagaggcctgcaggtgtggacatgcagccagggaggacagatgacagctaaccttcactgagtgctttctacaaagtggaagacagccaggggccacagtcggaaggacagagtcccaccccccaccccccacccccactccaggggtggcaggagggtggagccatggagcctggctgtgagctcctgggtgggctggcaacacctgccatgaattgggcacctattagcagtcaggcactggtgtgagactttacctagtcagagcccgcctgtctgtcttgtgtggccccaagagctaagaatgattttcacatttttaggtagttcttttaaaaatcaaaagaacaggctgggtgcagtggcttgtgcctgtaatctcaacaccttgagaggccaaggcgggaggatcacttgaagccaggagtttgagacctgcctaggcaagaaagcaagacccaacaacaagaaaatgtttaattagccaggcatggtggtgtgtgtctgtagtcccacctactgtggagactgaagtgggaggatcatttgagccccgggaatttgaaggtgcagtgagctatgatcgtgccactgcactccagcctgggtaatagaataggatcttgtctctaaaataaataaaataaaggaagaagacagccaggcatggtggcttatgcctgtaatcccagcactttgggaggccaaggtgggtggatcacttgaggtcaggaattcaagaccagcctgaccaaaatggtgaaacctcatctctactaaaaatacaaaattagccgggcgtggtggcgcatgtctgtaatcccagctacttgggggctgaggcaggagaatcgcttgaacccaggaggtgaaggttgcggtgaacagagatcgtgccattgcactccagcctgggcaacaagagcgaaactccgtctcaaaaaaataagtaaataaaataaagaaaggaagaagaacaatacagtcgatcctccatatccatggattcaactaaccacagatggacaatattccaaaaatcaaaattgtttctgtactaaacatgttcagacttttttttgtggttattccctaaacaatatagtataacaattatggcggctgggcacgtggctcacacctgtaatcccagcactttgggaggccaaggcaggcggatcactaggtcaagagatcaagacaatcctggctaacatggtgaaacaccgtctctactaaaaatacaaaaattagccaggcatggtggtgtgtgcctgtagtcctagctactccagaggctgaggcaggagaatcacttgaacctgggaggcggaggttgcagtgagccaagatcgcaccactgcactccagccagggcgacagagcaagactccgtctcaaaaaaaaaaaattatctatacagcatttacatcgtattaggtcttctgagtaatccggagataatttaaagtatacagagggtgtgcgtaggttatatgcaaatattactccattttatagcagtgacttcagcacctgcaaattttagtattaagtagaaggtcctggaaccaaagccccatggaacccgagggacagctgcgttttgtgacatctgaacagccacccccacgcacccacgggttgtcccacaccacaagggcagcgttgagtggctgcgatagaggccttacagaccttcagtttttctataaatcccatgaagtaggggtcaagtccccactgtacaaagaagagtaaaggggccacccagccttccttccctgctgctgttaggacctcctcctccacccactcctggtgggacagacccagcgccccttagcccagcaggtactcctggcccacctctgctgcacccgctcacctggcggagcagcagcgccccctgccggtggtccggggctggccggcgcgccctaaggccggactcttagcttctgccaccacctggtggccatttctggaagcgcagctgggagcccagatccggtgagcaaaagctctcgtgggttccaagagaggccctgctggtccagccaggtgtggcaacgaccagcgcgcaaagtattccaggcagggcttgacgcctccaagctagtatccactgaaaaagtttcacttcgtccctgctttttctttttttttttttttgagacagagtcttgctctgttgcccaggctggagtgcagtggcacgatctcggctcactgcaacctccgcctcccgggttcaagctattctcctgtctcagcctccagagtagccaggattacaggcacccacgacgctgggtaatttttgtgtttttagtagagacggggtttgctatgttgacaaggctggtttcaaactcctgacctcagatgatccgcccgcctaggcctcccaaagtggtgggattacaggcgtgagccaccacgcccagcccttgcttattattccatcggtgagaaaacacctgacagagcttaaatgtttactaactgtggctgtgaatctctaacccctggggaattgatcaaagaccatgaactatggccaaaagatgatggaggggatgtgaaggtcagctgacttaagtcccttcccccgtgcatttggccttgagtacttcatcattctttcttaacttcattcgttattcattctttcagcaaactcttcttgagcactacacaatgtgcggtgccaggtgctggagaaacacctgagaacatgcaaagcagtccgccctcatggaagtgactaacaaatcattcacaaggtgtgatgaggcatatttggaggggcagagaagccacttgagcatcacatatgggcagcgacttgaccttgttgagtgtcatggaaggcttacagtggcctgagaatgggtcgtctagccgacagggtggaagaaccacatgtgcaaagttccagagctgaggagtgtatccagaaagtggctggaagaaggactgaccggcaggaatgcagaggttgatggagagaggaggtgaggcagagctggagagagaagggggctgagccagacagagcctccaatgctgggtggatctgcaaagttaaggcatctgctcatgctctggggcaacagggggccactgcctgtcctgggaggagacagagcacattctgctccttagtagagcccactgtatgactgggcagctctgctagctggaaagttcattctgagatgaaattgatgcctcccctgcccacaggctcctgaggcatacacacagatggaggtgcttccctgcccccagcacagcccctcaccctataacagcctcactggctgttccctggcagaggccctcacacagggtaggcaggagggcacgctggatgtgaatcccagctcaagcccttaccggctgtgttgtctgtctcttacttaacctctctgaacttccattttctcctctgacttcagggctgcacatgtaagagggatagtgttgggaagtgcttagtacacattaggtactcagtggtgataacagaggtggtgacaatgacatggtttatccccagctgaccttttccagaaaagatcctatcagtcagtgttctgcattttaaaatgtgccaccaggatggggcacggcagcttgagcctgtaatcctggcactttgggagactgaggctgtaggatcgctagagcctaggagtttgagaccagcctgggcaacatagggagaccgcccccaccgcccacctttacaaaaaaattaaaaattagccggtcatggtggcatgcatctgtaggctcagctactcaggaggctgatgcaggaggatcacttgagcccaggaggtcaaggctgcagtgaaccatgactgagccactgcaatccagccagggcaacagagcaagatgctatctcaaaaaaaaaaaaaaaagtgctattaagagctgaactctgttctggggggagtagcctttccttcccttctctgagcctcagtttccctatatataaaagaaaggaatcagataagatggcctgaaaggctgccaccagttctaatgctctcaggtcctgctctctgacctacccaggacacatggaaccatcatcacctccttgatccaggcactctactcctcataatggaaccaagatggtcttcactttattttttttttcccattgtccctgtccttactgccctctgtgttatgccaacctcctctgagttaactgaggctcagaggctcaagcagtctttgccaccctctccccactgtcccccccacccctcactctcccaccagactgtctgctccatccccgtcccaactgctcccacctggactccctgctgcccttggttcctaccccacccctctgtccactcccccactcacatacctggccctccttcccccatgcagcccatctaccttcacagggaggcagcaagacacccccgccggcctaggagggtcgagatcctaggactctactttttccagtcctggtatttgcctacacgccccagcctcccacccccagcgccccccccaacacacacacacccacacacacacacacgcacgcacgcacgcaattataacccccttagggacagccgttgtgtctgctgtagtttagccttggattcatcatggcttcgacatcgccggccctgggccagtgttcgagagcatggccccaaacagttcttgctctgttcagctccccacattgccaagctgcgagcgggctctctgtgcttcctgccttctgtctgcctcgcctgttctctccaggtaggcggctcctcctccaagctcccccagccctgggctgacctctgtcacctggatggtgggtgcgggttctccgggcatgcacctcgttcccctctttactcccagcagtggctgaaacttgtgggtgcttgatcgtgctagttaaatgaatgaacatgtggtggttacaggcaaacccacaatgccacacaggacaccgaccaacaactgaaaacggtgacagctgcccttacccgcagctccccagcgtagccctcccccatcgcagccagaccggcttgcccactgcgcagcaaggcggagccccgcacagctaagcccgggcgtggtgctcgcggcgccctctgctggccgggcccacggcctcctcctgcgcacgcgcgccgccaccccgggaccagacctaaagggagaaggcgcgatctggggccctccctccgcaccccctcgccccgagaagccccaaacccaggtctttgaccctcatgaacatcctttgtccttcctctctcctgctccccctgcaaacattttaggcatccctaaatgatcaccagccctcgcctgctctcttagcaggcctccaggtggggttagaattgtcaaatgctggcacaggacgaaaccctaataataataactatgatgatgacggcagctgctgctgagcgggcactttgtggttaccttagcaaccttccaccatccaggaagtgcagccccttctttcacaggcggcagctgcagccagaggcgtgcggggacttcccaaggtcacacagcaagaatcctaagaaacccggggtgtttcctctgcctacgtggagctaaccctgcctccagaagcaggggccttgagatgggagcagagcgatctggtgccccggaaaccccacccccacccccaccttgccccatgcgcagcgaacgtggctacatttcctatcgtttgtccaacccatcattttgcctttgggaaaattgcaggggaggtggaggccagaggacagggagacaaacgttcgtgggcatctgccacgagcacatttgccacgctttgtgacaggccctttcccgttacacaccacacctgcccaggaccgcagcacagaaccaggacccaaacccgccgactccctccctagtgctccttcctcaccccccaccccctcccccctccgcaagttctctcttggaaaaggggccgctgggaaggggaggaaacgcactcactacaggactccaggtggggtccagaggctctgcccctggtgcctcttccccagccctaaagcccccagccctagagaggggaccctcctgcacaacatctccaggggaccgggtactccactagggtcgagaaacgttgaatagtgcggtgggtgcgggaggcgcgcctaggtgccgaaacccggtctgtgctgccatcctgtggccattgcaggaagtgtgcctgtcaggccgctctgcattgaacctgaaatgccgggtcacccttgggttgagtgaaaccgggccccatgctgaggctacaagggacatagaaagggacaagacgcagcccgtgccctgaaagagcttacagttcggtaggatggccttcaaatgacatgatccaacactcaactcggcgccagataccgcccaaaatagaagatcgtgcaaaaggttccaaaaggtggaggcagcctgccccgaagcacatcgagaaagccctcctgcagcaaagccgtgtcgagactgggccttacagggcaggcggggctggggcaaacagagatgaaggaaggcgctccaggcggagagaccagcctgagcaaaggcacaggggcaggaaacacggattctcaggaatccagcttgtcccaagtctaggtcaactgtgaaggggagagcagcatggccaggtcctccagtgcccaggtaggaggtttcacttaaccctttaggccacgcggccaacaaaggtctttgagcaagccagcagcttgaccagaagtctgtccaggaaaagagcatgatagctggggaacgggggcaaatgggtgaggtttcagagcaattaggaaggaaggagaacaggaggaggcatgagcgacgcggatggtggtgccactggcagagctgggaagtcaggggccacgcaggggagaccagggctggggtttaagttcctggcagaacatcccagtgaagacgtccttcaggaagccagaaagaatacattaataaaagaggaagtaatagttattgctcatatgtgtacagactttatagtaaataaagcagcttaatccatcatgcatttgactcatattttatttatttatcttttttttttctttttgagatggataaaccccacccccttgcccaccctcgtggtctggcccctgtgcactgctccggcccctccccttcccagtgtcttatgatggcctctgggcctttctagtcagcttgggcccacgtcttccctttgcctggctgagcttcacttgccctgtggtcttagcttagtggttcctttttccaggaatccttcctataccttgcaggttgggttgggtgccgtagctgtgatgcccctgccccgtacacccttgacatttgcccatcatggcctgtatggtgcgtgactgtggtctgtctccccaccaactttacttcagtgtggcggctgggtcttattgaccactcaccccagtggcctgctcagtatcagtcaatgaacatttcttgaatggaagacctgagtgaggaatgtgaagccctgcgggacctgctggcacagcgcagcagccgaagcgggggcagacagaggcatccgggagggccagagctggtctctgaaggctggtctcgaactcctgacctcatatgatccacacacctcagcctcccaaagtgctgggattacaggtgtgagccaccacacccagcctggaaagtttatttattcaggtctgttgcagcctcacttcccagtctgtgaagataagagctaatttctcatccagagaagggacctccgagaggaatctttatggcttactgcatacaggaaaagacaggtcagctcgccctttctaaaactacaatttctccaatatttacagctcaaaataatcactatgccaatttggcatatttggggatggcacgttcttcactccgttgggggacttcagtgaatacggtgttagattgcagtgagggagacagatattaactaacagccaaaataaataagtaaattacagggtgtaggagatgatgtcctggagggaaatgagcagtaatgcagaaaaagggagaggaggaagactgcggggaggggtacaattcaaaatagggaggtcaaggctgggcacggggactcacacctataatcccagcactttgggaggccgaggcagatagatcacctcaggtcaggagtttgagaccagactggccaacctggtgaaaccccgtctctaccaaaaatacaaaaaattagccaggcgtggtggcacgcgcctgtagtcccagctactcgggaggctgaggaaggagaaccacttgaactcaggaggcgggggttgtggtgagccgagatcacgccactgcactccagcctgggcaaggagagggaaattccatctaaaaaataataataataataagagaggtcaggacaggcctcatacaaaagtgctatgtaagcaaaaccttagactttgagaaagaaagccatggagatatctagagggaagcttccagaccccaaggtgggagcatttctgacatgctctaggcccagctgggggctggtgtggctggagtggggacggaaggccaagtagttgagatgagatgagcagagtcacaggcactggatcacagggggcctcctagaatgtggtggagactgtggctgctgtgtcgaatgaaggtgccagggagcagggacaggagtgagacccactgggagatgaggaaactactccaatagtccaggcgagagaggatggtggctcagatcagagtggagcaaaggaaccctacactgaactgtaggcttgaaaatgatgtacaggtggcaagaagcaacgagacactggagctaacacgcagggaaagcccccagacgtcccaacaaactgtagtgggcggaggagtcaagaatgctattactgagaggatagagctgccatgaacaatgggaaggttgtgggcaggagctgttcagtggcaggagattagaggttcagtctgagtcatattgagtttgagatgtttattaaacatcagtgggggccaggcacggtggcttatgcatgtaatcccagaattttaggaggccaaggtgagtggatcacctgaggtcaggagttcaagtctagcctggccaacatggcgaaaccccgtctctattaaaaatacacaaattagccaggcatggtggcacgcacctgtagtcccagctacttgggaggctgaggcaagataatcacttgaacccagaaggtggaggttgcagtgagccaagatggcgccactgcactccagcctgggcaacagagtgagaccctgtctcaaaaaagaactaaatgaataaatactgttttccaaccctgtgtgttttcatgcccacttttgcacaggaaggaactgagaatcagatgggtgaaggcacttagccaggcgggaagctcccaagagcaaagccctggcccaaggatccttgccccggagatgtttctgtgtgtttttttgagacagtctcattctgtcacccaggctagagtgcagtggcatgatctcagctcactgcaacctctgcctcctgggttcaagcaattctcatgcctcagcctcccgagtagcctgaacagagatgtttctggttcactgagctgctgtgattctaacaccccctctggggagagatctggaaatataaacccatgagagctgaactgaactaacgtgcaactttaggaatcttttttttttttttttgagacagagtctccctctgtcaccaggctggagtgcagtgagagagcacaatcacagctcactgcagcctcgacctcccaggctcaggggatcctcccacctcagcctcccaagtatctgggaccacaggcatgtgccaccatatccagtgtattagttcattctcatgctgctgataaggacataccctagactgagcaatttacacaagaaaaagggttttttttttcttgtttttatgggtttttttttttttttttttttggagacagagtcttgctctgtccccaggctggagtgcattggcgtgatctcatctcactgcaacctccgcctcccgggttcaagcaattctcctgcctcagcctcccgagtagctgggattacaggtgagcaccaccacgcccagctaatttttgtatttttagtagagacagggtttcaccatgttggccaggatggtctcgatctcttgacctcgtaatctacctgcctcgacctcccaaagtgtggggattacaagtttgagccaccgcgcccggccaagaaagaggtttaatgaacttacagttccacatggctggggaggcctcacaatcatggcagaatgagaagcaagtcatgtcttatatggatggtggcaggtaaagagagagaacttgtccggggaaactcctctttaaaaaaacatcaggcagccataaaaaatgatgagttcatgtcctttgcagggacatggatgaagctggaaaccatcattctcagcaaactatcacaaggacaaaaaaccaaacaccgcatgttctcactcataggtgggaattgatcaaagaaaacacatggacacaggaaggggaacatcacacactggggactgttgtggggtggggggaggggggagggatagcattaggagatatacctaatgctaaatgacaagttaatgggtgcagcacaccaacatggcacatgtatacatatataacaaacctgcacattgtgcacatgtaccctaaaacttaaagtataataataataataataataaacatcagatcttgtgagacttattcactatcaagagaacagcatgggaaagattcgcccccatcattcaattacctcccactgggtccccactataacatgtgggaattcaagatgagatttagggccgggcacggtggctcatcttcttcatttatcacattgttaaaataattgggaggccattagactgaagccactctagtgccctgggtttcttttttttttttttttttttgagacagagtttcactcttgtcacccagcctggcgtgcagtggtgcaatctcagctcactgcaacctccacctcctgggttcaagcaattctcttgcctcagcctcccgagtagctgggattacaggcgcctgccactacgtctggctaatttttagtgtttttagtagaggcggagttttgccatgttcgccaggctggtctcaaactcctgacctcaagtgatccacccacctcggcctcccagactgctgggattacaggcatgagccacggtgcccggccttgtgccctgggtttctatgtaagtaaatcaaaacccatctcagtatagatgggtttaactaatcagaaaccaccacaagttactactagcaagggactttccatgcgaataatctgcatttgaaccaatcaaatagtttctttgctctgcttcaaagtttaccctatacaatttttcctttatgctctgaaacaccagaatcccccagtctgggattcatcccccagtctgcctgattcatgaatcactgtctgctcaaattagcactttttttgttttgttttgtttttgaagagacaaggtctcactatgttgtccaggctggtcttgaactcctgggttcaagtgatcctcccacctcagcctccaaaagtgctgggattgcaggcatgagccacctcacctggccagctctttaaaattctaatatgccagtttatcttttttttttttttttttgagacggagtctcgctctgtcactcaggctggagtgcagtggcctgatctcagctcaccgcaagctccgcctcccgggttcacaccattctcctgcctcagcctcccaagtagctggtactacaggcacccgccaccacgcccagctatttttttgtatttttagtagagacggggtttcaccatgttagccaggatggtttcgatctcctgacctcgtgatctgcccgtctcggcctcccaaagtgctgggattacaggcgtgagccgctgcacccagcgcaagtttatcttttaacacctggaatacttctgttaccagaaaggggtcctgagtcctgatccagaccccaagagagggttcttggagctactgcaacaaagaattcagggcaagtctacacagtaaagtgaaagcaagtttattaagaaagcaaagaaatttaaaaatggctactccataggcagagcagccccaaggtctgctggttggttatttttatgaatatttgttgatctcatgacaaatatagggtagactgtttatcagttttctgggaaaggggcaggggtttcctggaactgaaggttcttcttccttttataccatattgggcaacctccgggcattgccatggcatttgggagtgtcttttagcatatgctaatgtattataattagcatataatgagcagtgaggatgaccaggggtcacattcattgccatgttagtttgggtgggttttgtctggcttctttagtgcatcctgttttatcagctgggtccttgtgtaactactgtcttctgcaagaatctattattatctgatatattatctttttttttttttttcagacggaatctcgctctgtcgcccaggctggagtgcaattgctcaatctcatctcactgaaacctccgcctcccgggttcaagcaattctcctgcctcagcctcccgagtagctgggactacaggcacccgctgccacgtccggctaatttttttgcatttttagtagagacggggtttcaccgtgttagccaggatggtctcaacctcctgacctcgtcatctacccacctcggcctcccaaagtgctgggattacaggcgtgagccaccgcgcccggcctctaatatattatctttatctttaaagcaaaactcacactaagaatgctctaagaatgctttttgttgtttttgtttttgtttttgtttttgtttttgtttttgtttgagaccgggtctggctctgtcactcaggctggagtacagtggtatgatctcagctcactgcaacctccatctcccgatttcaagcaattctcctgcctcagcctcctgagtagctgagattacaggtgtgtgccatcacgcccggctaattttttgtatttttagtagagacggggtttcaccaagttggccaggatggtctcaaactcctgaccttaggtgatctgcccgcctcagcctcccaaagtgctgggattacaggcgtgagccaccgtgcccggccttgtttcttaaggtattggtacatcaggacatttcctgggtctgttcattaaacacgattaacttgtttgttcccttaactgtaaatttttttgttaaaaaaaatcagttcaaaataatccttatgctgaagaagtatatttggggcagcatattccggtctatggtcatattttggggtggcatattctgatctcctacaatttaaaggtataatttaaaaataaaaataaaaatttcagccagatgcagtggctcacacctgtaatccctgcactttgggaggccaatgtgggcagatcacttgaggccaggagttcaagaccagcctggccaacatgacaaaaccctgtctttacaaaaaataacaaaatttagccaggtgtggtggcgcacgcctgtaaacctaactactcaggaggctgaggcaggagaatcacttgaacccgggaggcagaggttgcagtgaaccgagatcacaccactgcactccagcctgggttacagaacaagactccatctcaaaaaaaaaaaaaaagaaagaaggaaaattttggatgtttctaacccctcctgctctctagaggttctataaacctgcaaccctctttttttttccccagtactgaaataggtcttggctgtacacatttgggggcaagcagggagcagggataaactgacctgcaaaaccagagacagaaaagttgaaggtctgcaactgggaggggatcaaaggaggagatgaaggagccaacaaaacaggttctagatgggagaaagcaacccccatagagaggtcaagagggatctaagcaagttaagacttttgagatatggggtgtgtgtgcatttgtgtgtgtgtgtgtgtgtgtaaatgccctcccccacctctttcaggggtcactgagtaaagtttacatcactcacactgaagctgtcctcacaagtttgacaaaaactctggataggaatacaggtataattaagcattaatcgggctgctctttggcccagttccttgtaacctaaaatcacctaacactcagtactgaacatctgcatttccatgttcctacagataggatctctgacattagaatcatgagacttctgtttaagaattgctgaagatggccaggtgtgttggctcatgtctataatcccagcactttgggaggccgaggtgggtggatcacctgaggtcaggagtttgagaccagcctggccaacacagagaaaccccatctctacaaaaatacaaaaattagttgggcatggtggtgcatgcctgtaatcccagctactagagaggctgaggcaggagaattgctggaacccgggaggcggaggttgtagtgagcccagattgcatcattgcactccagcctgggtgacagagtgagaatctgtctcaaaaaaaaaaaaaaaaaaaaaaaattgctgaagatgtttctccaatcctgaattccaatggaacagctgatgccaaccagtttgaaggttcccacggagtaatcaaattagcataagaatgcagtttcttcatttccctgtaggtgaattcaccttgcaccaatcaatgatcagttccctccaaaacccttaaaattcctagccccaaactcctcagggagatggatttgaggtttcctctggtctcctcattcagcagccctacaattaagcctctttctctgctacaacccagtatctcagttactggctttccatatgcacatcgagcaataaacctactacggttataacttgtgttttaagtgaaaatgaattctttggggagactgtgaagagctgccgaggactgcacacagactgacacagcacagagcaaagggagcctcaaagaatttggtgtcttcataaatctacacaaaaccagatggaaagaggccagaatgggtcctggtcatctctgggtggtgactgatttaacaggtgattttttggttgctttgcgactttttaattttttatgcaacaggcattgcgatattgagatatgatatgaaaagttgtttgatattggtccccagttcctggcacagagccctaatgtaatataataaattaatatttgtcttttgtccccagctcttgaaatatccctggagcaacaaaagttaaaggaacatcttttgttatcaaaacaagcctgtttcaaccacacaggagtttaagttaatgagtgacttttggaaagcccctaaggaggggggctggatgccaggggaaccaagcatgtgattagagaagtagaactttcagccccacctcctggcctctggggagggaagagaggcttgagattgagtttaatcaccaagggccaatgatgtaatcaaccatgcctacataatggaagcaccataaaaacccaaaggacccatcaaggtgttgggaggatggtgcacccgaaagcacgtcaaagctccccacacttctccacacctcaccctgtgcgtctcctccatcctgccaggtttgttttgttgttgttgttgttgttgttgtttgttttgttgttgttgttaagaaggagtctggctctgttgccaggctggaatgcagtggagcaatcttggctcactgcaacctctgcctcccgggttcaagcgattctcctgcctcagcctcccaactagctgggactacaggcacccgccaccacacccggctaatttttgtatttttagtagagacagggtttcatcatgttggccaggatggccttgatctcctgaccttgtgatccacccgcctaagctcccaaagtgctgggattacaggcgtgagccaccgcgccctgcctgttttgagttttgttttgttttgttttttgagacagcgtctcactctgtctcccaggctggaatgcagtggtgcgatctcagctcagtgtaacctctgcctcccaggttcaagcaattctcctgcctcagcccgttgctgggattacaaattgctgggattacaagtgcccaccaccacacctggctcattgttgtagttttagtagaaacagggtttcactgttttggccaggttggtcttgaactcctgacctcaagtggtctgcccgcctcggcctctcaaagtgctggtattgtagcaatgagccactgcacccagccatctgctgttttttagttgtattcttttataataagctgtcagcctggtaactcaactgttttcctgagttctgtgagccattctagcaaactatcaaatccaaggaggggttgtgggaactcctgatttataaccattggccagaagcacgtgaagcgcagacttgtggctggcattgcagtgggacagtcttaaggaattggaggctgcagtgagctatgatcacaccactgcactccagcctgggcaacagagcaagaccctgtctctaaaagtagatagatagatagatagatagatagatagatagatagatagacagacagatagataaaattttaaaatgaagtggggtagtattgtagagttaagccattaacctgtatagtcttgcaataggagttccacaggactggttttgcaaggtacaggtcacgaagacccctctgataaaacgagatgtggtaaagaagccagccaaaaccaagatggtaatgaaagcgacctctggactgggcgcggtggctcacgcctgtaatcccaacatttcgggaggctgaggcaggcatatcacgaggtcaggagatcaacaccatcctcactaacacggtgaaaccccatctctactaaaaatacaaaaaattagctgggcctggtggcacgtgcctgtagtcccagctacttgggaggctgaggcaggagaatcgcttgaacctgggaggcagaggttgcagtgagctgagatcgtgccactgcactccagcctgggcgacagagcaagactctgtctcaaaaaaaaaaaaaaaaaaaaaaaacaaaaagaaagcaacccaacctctggtgtccttactgcttattatatgctaattataatgtatcagcctcgtggtcagcaacccatttttgggtcccctctcactgtcgagagcttttctgtccctcaataaattctattctgccttactcactctctgctgtccatgtacctcatttttctcagtcatgggacaacaattcggaactcattgaactacgggggtaaaagagcataaaaacttcttagtaattttccaccaatctccctaccctgttccttggctataaatccccaattttccctattgtagagagagtgaaacccagtctctctcctctgctacaaaaccccaatgtaatagctcccccttgaataaagtcttccttcatctttaacaagtgtcatgagtaatcttttctttaatgccacactgacctgggcaggacattcagcacctcccccaagctctgggaagggaaaccagcagtgactacaaggatgcctgtatggggccctggaccagacccagacaatcttccagggcaggcaccccttccaggttaggggcacaggctctggatctgaattccagccatgcaacttaccagctgtgatcttgcaaaaatgattcctctctatgattcagtatctttgttaccaacaaagctggtccccagaaaatggagcctttccccgtttggtgttacaaatcaatatgcaaaactgaaagtgaatgtcaagcagtgcaggctttagattagacggtcatggaattgagaagtgggagcttgggctcggctcctgagagccaggaagtcacagatatagggcacctttaatgaaagggttggatattaaaagtaaggggaggaatattcatttcttttctgggaatgggtggagaactccttgaaactggagtgccgtcttcctttttgtgtttttgtggtttcttccggtcttagtcacagtgattgttaactgtcatggtgctggtgggagtgtcacttagcacagaaattagttataatgaagttagaggttcttcagaggtcaagtgagctgccttggatcccacaagtcttagccagtttggtcagaagggggagcttttgacctcaagcatcctgtttcctaaagataagcagaattaaggcagggtagaaattcacctatgtcacacaggcattacactgggtaacatcctcatctgtaaaagaaaataacaattctcgccaggcacagtggctcacacctgtaatcccagcactttaggaggccaaggtgggcagatcacctgaggtcaggagttcaagaccagcttgggcaacatagcaaaaccccatctctactaaaaatacaaaacttagccaggcatcattgtgggtgcctgtaatcccagctactcaggaggctgaggtgggagaattgcttgaactcaggaggcagaagttgcagtgagccaagattgtgccactgcactccagcctgggctacagaatgagactccatctcaaaaaaaaaaaaaagaaaagaaagaaagagggaaggaaggaagggaaaggaaggagagagagacagaaagagagaaagaaagaaagaaagagagagaaagaaaggagggagggagggaggagggaaggagggaaggaaggaaggaagaaaggaaggaaggaaggagggaaaagaaagaaagaaagaagaaaagagaaaagaaaagagagggagagaaaagcaggaggaaggaaggaaggaagggagggagggagggaggggagggagggagggagggagggaatttgtttgaatcttatgttgtgtgctgtaatgagattgtccacagtagcactggcctcccagaccctctccaaatatgcacggcacatctgagctccggagagaattggggtgcatgccccaaatgctggcctccatcaagaaaacagataacccctttataagagcacaatcatcccagaggttcctcgctcaggaaacctggtccctcttgggtggccaggcagcccagcaggaagagggccaccaccgctatcctgccaggtctctgtctgcagaaggactaatgagctttgtcaggattccatgggacagggtgtgaaacactcagctaagctcgtagcaagagctcaaccactgtaaatttcacaaaataaaaaaaaaaaaaagaccgtacaaaactcctctcaggaagagttttatctatggtagagggacagctgctaagctgtttggggcaaaggatgaaatcgatgccccccactgccccggtgcatgctcaggtggcagtatctgtcttgggctaggcaagtgaaaagaggagagaatttcaccttgttggcccaggaagggacacagtttgggtgagtgaatactcaataagccacttgagcaggaaaaagttccctcgacatccttggcccggctttggtacatatgaccatcaccaagctgtcttctaaactgggagcagggagagaaatatgcaagctcacagcagagctaaatcactgggaactagagatgctggaggcgggggcaggagacaaagaaatgaggcaggtggtggcagagaaggctggaaagaacagccgttcctgtgactagggcctgccatgtgtgtgccagcaggctcgcttcagcctagcatcctgctgagcagcactgtccagtaggaatagaacgcacaccacacatgcaactaaatagctcctgggggctcccaggagccacgtttctttaaagtaaaaagaaacaggtgaatttaacttaatagtatattttatttaatataatagatccaaaatattcttattttaataagtaattcatataaaaagtattgtgaaggctgggcacagtggctcacacctataatcccaacaatttgggaggctgaggcacgcgaatggcttgagcagaggagtttgagaccagcctggccaacatgctgaaaccccatttctacaaaaacatacaaaaattagccgggctaattcggtaatgtgcgcctgtgatctcagctactcaggaggctgaggcagcagaatcgcttgaacccaggaggcagggttgcagtgagctgagattgcgccattgtactccagcctgggcggcagagcaagactccatctcaaaaacaaacaacaacccgggtgcggtggctcacacctgtaatcccagcactttgggaggccaaggcgggcagatcacgaggtcagaagttcgataccagccaggccaacatggtgaaacgccgtctctactaaaaatacaaaaattaggcgagcgtggtggtacacacctgtaatcctagctacttgggaggctgaggcaggagaatcacttgaacccgggaggcggaggccacagtgagccgagatcgcaccattgcactccagcctgggcaacaagaacaaaactctgactcaaaataaattaatcaattaatataacataatataaagcattgtgagactttacagttttttttcatgctcattcttcagagccctgtgtgtttttacacttacagtgcatcctcattcagactggccccatttccagggttcagaagccacaggtggcttgtggctgctgtggccctttgagagttagaattaatttggggaagatgggtgggtgcagaagagaggggaggctgcccagagaggcacctccaggtgacatgtgcttggggccagagctgcacactggggacagctgagtgttggggggtgtgcagaggtgtggctgaaaggggatgagcagtgtgtcccaactggtgagggttgtcaccacacggcaccagccctctctgcgtttcctcctgtcctctcacagtgaaagtgaaggacttgatgagtcttgctgctcgattactgctggatgaactcttggagacagcccttatatgagttacactagtttaaaaaatgaaatgaaatgaaatgaaaggagggctagaggacctatgcctaggtccaaggcagactgctccacccaaacacacctgtaagcttgtcccaggaaagtggccagatctgaactgattgccatcaaacatgtctaatgctcttccctccatctggaacatccacctgccctcagctagagaacacctccttcagtgcccggtcagaatatagaacccctctgtgcacctgtgtctggcacctcctccacgcttcctgggcccctggttccttggagtgctgtctgaaccctcgctaggctgtgatctccttgaggcccaatgccaggcctggccttctccacctccctaggctgcactttgtatcctctcccacccacctcggcagttgagtccgcagttgggccacctggatggccctgcccggggaagaggaaccaagggctctggtctttatctcccttcctaaatgaagtttccccccatctataggagctcctgcaggactccctgaaaaaggaggaaagagaggaggggaaggagtgggaagcaggatggggaagacagatgctctgccagcaaagaggcaaagaggaactgagccaagtccccaccgtgggttggcataagtgggtccctggcaaggggagggaaagtaagaacaagaagaaaggctggccgggttgggaggtggcggtaaaatataaccgccatacacacacaacacacactagccataagggtacagctcaatagatttttgccacctggatcaagaggaaggtcatttccagcaccccataaggttcccccatgtcaggccgggcgtggcgcagtggctcacgcctgtaatcccaacactttgggaggccaaggcaggcagatcacttgaggtcaggagttcgagaccagcctgaccaacatggtgaaaccccatctctactaaaaatacaaaaatttgcaaggcgtggtggtgggtgcctgtaatgccagctacttgggaggctgaagcgggaggatcacttgaacccggaaggcggatgttccagtgagccaagatcgcaccactacactccagcctgggagacagagtgagatatcatctcaaaaaagaaaaaaaaaaaagtttcccccatgtcccttcccagcatctaccctaggcaggtttgaagaattgatgtattgccagcagaaccccagctgatgcccgacctgcacatctcatcattaccctgtgcaggctgcagatcaagctgcaacaggcccgggtctccctccttctccaagtggtaagaacagcagccttcattcactgggaccttctatgtgcatgggagcgggggagggggaactattctagtcacttacatacgtgggtcgttaagtcccaaataaggaatgcaagaaatgtggcattaattggactttctttaaatcaagtgagatccttgccaattaacatcccactgggctgctcagaaatccagccttggaaatgacaggggctccagccctccccaggattctctctcgctcacaaggttttctagagcaccagagctacaaggagcccctagaccagatcatctatctgccttggttaccatggagatgtctattttcccagagggtgcaatcccttcctggagggagattctgctgcttccgtgccacgttggtggccttggagaatcttattgaggtcgagggtcccaaggtgtcctacacagccatgcccttgtcacatcccaaggagatcaccatggagaggtgcccacctctgtcccatcctcattcagaggggctcactcctgtcccctgctgctctcggaggctctctctctcccttcccctctgggaaactggtataatctatatagtggtttcataactttacatttttatccggctgtacatagtctcctctttaaatcccctcaacagcctatgagaagggcattattgtctctgtcgtacagaggagaaaatgcaggctgggaggggctaagtcgcccaggcaacaagatggagatgatattcagatacagacactccagagcctgtgctttgtaccctgcccttggctgcccaggtgacagcatctcaaagccaggagcacactaataaagaagccagcattaacagcaggcatgcatgccactttcaaactaattactcctgcctccatgattactcctcaggctcctggggctggggtaacctcccacactggaaggtagacttcggaagacccttctggaaatgctcccaacttgggaaaacagcgcttcagacttcagacccaggaagagatcacccagtgctccttttatggggcatacaactgaagccaagaggtaaaccaggtcacccacaaagctggtggcaagtcaagaactgagtctcaggcctggtgcggtggctcatgcttgtaatcccagcactttgggaggccgaggtaaaggattacttgagcctagcagttcaagaccagcctgggcaacatagtgagacctcatctctaccaaaaatttaaaaaattagctggctatggtagcacatgcctgtagtcccagctactcaggaggctgaaacggatcacttgagcctaggagttcaagtctgcaataagctataatggcaccattgcactccagcctaagtgacaaagccagaccctgtctcaaaaaaaaaaaaaaaaaaagaactgagtcttggccgggtgttgtggctcacacctgtaatcccagcactttgggaggccaaggcgggcggatcatttgaggtcaggagttcaagaccagcctgggcaatgttgtaaaaccccttctctacccaaaatacaaaaattagctgggcatggtggcacctgcccgtaatctcagttacttgggaggctgaggcagaagcatagcttgaactcaggaggtgaaagctgtggtgagccaagatcgcaccacttcactacagcctggacgacaaagcgagattctgtctcaaaaaatattttagtgtgacaaaatattgcatgcacactgggaaggacagctccaattcattcattcaaactctctcccaaaaccctttccagcagaacaatgtccgtcagggcaaagtgttgtgggatgtcagggactcccaacagagggacccgctgaagccatggcagaagaacataaattgtgaagatttaatggatatttattagttccccaaattaatacttttataatttcttacgcctgtctttactgcaatctctgaacataaattgtgaagatttcatggacacttatcacttccccaatcaatacccttgggatttcctatgcctgtctttactttaatctcttaatcctgtcatcataagctgaggaggatgtatgtagcctcaggaccgtgatgattgcattaactgcacaaattgtttgtagagcttgtgtgtttgaacaatatgaaatctgggcaccttgaaaaaagaacaggataacagcaatgttcagggaacaaaggagataactttaaactctgactgcccgtgagccgggcagaacagagccatatttctcttctttcaaaagcaaatgggagaaatatcgctgaattctttttctcagcaaggaacatccctgagaaagaggatgcgtccctgagggaggcctctgaaatggccactttggggacagctgtcttttacggtcatcgctgagggatgaaataagccccggtctcctgtagcgctcccaggcttattaggacgaggaaattcccgcctaataaattttggtcagaccggttgtctgttctcaaaccctgtctcctgataagatatcatcaatgacaatgtgtgtctgaaacttcattagcaattttaatttcgccccggtcctgtggtcctgtggtcttgccctgcctccatttgccttgtgatatcttattaccttgtgaagcacatgatctctgtgacccacaccctattcgtacactccctccccttttgaaaatcactaataaaaactcgctggttttgcggcttgggggacatcatggaacctgccgacatgtgatgtctcccccggacacccagctttaaaatttctctcttttgtactctgtccctttatttctcggaccagccaacacttaaggaaaatagagaagaacctacgtgaaatgtcgggggtgaattttgcctgatagtaaaggttcccaagttggctgactggggccttagcttctcaaaaggggaagaccatgagactgggatgcccatgacctagccatggttcctccttcctgatgtcaaggaaaccaaactattaatcaagtttatttagtaaatatagaatcaaaacaaagtatcaggccaggcacactggctcctgcctgtaatcccagcactttaggaggccaaggcagggggactgctttaagcagttgaggctgcagtaagccatgatcatgccactgcattccagccagtctgggtgacagagtgagaccttgtctatatatatatatatatacacatacatatatatatacatatatacacaaatacacacacacacatatatacacacactcatatacatatatatatatatacacacacatacacatatatatatcaggtacacctagcatttcctccctcagagtttttctgagttttctggtgggcacatgccctgccccacagtggactccttcctaccctctgtcagccagaatgctgcctccccagaggccttctctgaccaccccatctgaaggagcctggccctttcacatcaccctgtttacctcctttttggcacctctcacaatctgtcattatccttttttttttttttttgagacatagtcttgctctgtcgcccaggctggagtgcaatggcgccatcttggctcactgcagtctcctcttcccgggttcaaataattattgtgcctcggcctcccgagtagctgggactacaggcacacgccaccacgcccagctaatttttgtatttttagtagagacagggtttcaccatattggccaggctggtctcgaactcctgacctcgggtgatccgcccacctcagcctcccaaagtgctgggattacaggcataagccacagcgcccagcctcattatcttattatttgtttagtggctctctctcccgctggccttcaactccacaagggcagtgaccctgactgtcagggacataaaccagcagtccatgggcatgcatatttttgtttggcttgcagtgttgtatcaaaaattcaatttattcctgtaatcccagcactttggaaggccgaggcaggcagatcacctgaggtcaggagttcaagaccagcctggccaacatggtgaaaacccatctctactaaaaatatttttaaaaaactagccgggcgtggtggtggatgcctgtaaccccaactactcgggaggctgaggcagaagaattgcttgaacccaggagacggaggttacagtgagccgacacagtgccactgcactccagcctcggcgacaaagtgagactctgtctcaaaaaaaaaatcaatttattggcaatatttaaaaatcaagagattttatgtaaacacctggatttcctggcactcttgaaaaagatctagcacaatgggctggaggtgagcggccactgcagcccgtagttcttactccagcccccagtccaccccattacatcacacttggctgtttgcactccttgatcctacttacctgcctatccccggaggcctttgagtctaaaattcctggtctcttttcaccactctacttacccctacaactgagtgttgaaataaataaactgaaagcaagaaaggttgactgttttgaaggaaatatttcatctaaactctaggaaggctctactccacacaagctgtgccacatgaaggacgccctctggtgccagaattattctcgggggggcccagaaccagttactataccttgaactcatgccaatgagctgggcacactttttccttagatggattaatctaatctaaatgaaaattttagatcggattaacccactttagaataaatctaaatggcaatctaaattatgcggttaccgttttgattatattattgtatgttgattaatcaaagtgccgccctaaatcccgctgtgactccgtgggtagtagggtgggtaggtaggtgggtttgacacaacggggatttctcgtgtttgggaggctcatcatctaaatcctctctaaggagtgttcatttaccatatgaaactccccttttcgagaagacagggatgcaacagggtcaagaaggtggaacgtaccaaaggacacagtgcgtaggcgcgctcgaaacctgggccggtattctcggcacccagacaccgtccactcgcactgcgcaggctccgagacagatcaagctttccctccccctcccagctctcctagagtcaagaggacgccctcctgccgcagacttcctgcgcaagcgccatcccatgtccccgcctccaaaccaattggaagcggcgccgcctgggcgcttggggcacgacgctgtgggtggggtcaggacgtgagggcagcgcgctggcgtcagaggcgcggctatataactaaacacaggcaccgcccctctgccccagtcactgagccgccgccgaggattcagcagcctcccccttgagccccctcgcttcccgacgttccgttcccccctgcccgccttctcccgccaccgccgccgccgccttccgcaggccgtttccaccgaggaaaaggaatcgtatcgtatgtccgctatccagaacctccactctttcggtaagctatgggaaaggtcgcgggcccgggtggggcagcggggccttccgggcccggagacgtgttccgggaagttgccaagcgctccgggccttcgtaagctcgggcaggggaaacttgaccagggtcgcagggcagcgggatcaaggcctgggccccggggtcggaccctgagcgcgaccggaaggagcaggcggtaggtcagcccttgggcgggcccggcgtctcagtggcgcatttactaatggctcctgggcctcctcgggccacacccgcccctcccgtcaccattgcgtcacgtccgttacgtcaccacccgttgtcacggatccggagggaaaggcggtgccagccctaagtggcaagcgggtgcaccaatgggggtgggaggcttagccccgcctcgggagctcgggttccggcgggttgcatcagctgggtggggcaccgcctggcagcccggactcccccgacatgtgatcggcttcccagggagggcgggaggcccgggcgttccccgagcctggggaagctggccgtcccggactgacctgctcggggagagccagcaaaggacacattcggcctggcccaagccctgacgatttcagtgttgttttctgcacgcgcaaaacacctggggaccgaggggatggcagtggcatcctatctttgacagctctgaacgagcttaaccttttttttcagacccctttgctgatgcaagtaagggtgatgacctgcttcctgctggcactgaggattatatccatataagaattcaacagagaaacggcaggaagacccttactactgtccaagggatcgctgatgattacgataaaaagaaactagtgaaggcgtttaagaaagtaggtcttcagtgagattttgggaaagtcataatggatttgtccacaagggggtgccagctgtgttgtatgtattgttagcggaaggggtgataaatgcgttcatgctcttgctaggcctaattcgttttcctttgtgcttgcagaagtttgcctgcaatggtactgtaattgagcatccggaatatggagaagtaattcagctacagggtgaccaacgcaagaacatatgccagttcctcgtagaggtgagttcagtcactacttgatttgtgcctctctgctggcaaatctcagatcctgtctgttagcttctgctggggacataaaagttggctttgtaaggctgagcaaaacctcagttgggttttaaagtacatagacttatttctgttttataggaaaaagcagaagggacttgtctacctttggtttactgtttctgtggatctacttcacagatgcaaatttgaatagcatatagatgcattgtaaaataagccaaatgctgggttgttcctgtatttgtaaggacatgagtttttaaaaatgaatttcctgagtattaatactaaaatactgttacatgatcagctcttgatataattgaagagatttcagatacctgatgagtctcattctcacactaattcagaaccttggaaggcactgagtgttcaaaaaaggtagctcttaactgaggaccctctgttgaaccattgtgcgcacccctggctcttgggcagtgtagtagcaggaagacagggttgttgccattagaaatggaggctttaactctccctgtcccccatttaaaactttgcccttttgtcttttcagattggactggctaaggacgatcagctgaaggttcatgggttttaagtgcttgtggctcactgaagcttaagtgaggatttccttgcaatgagtagaatttcccttctctcccttgtcacaggtttaaaaacctcacagcttgtataatgtaaccatttggggtccgcttttaacttggactagtgtaactccttcatgcaataaactgaaaagagccatgctgtctagtcttgaagtccctcatttaaacagaggtcaagcaataggcgcctggcagtgtcaagcctgaaaccaagcaataccgtcatgtttcagccaagcccagagccctaagattacaaacaactatggccggaacctcctcagctctccctctgcagagttccctaccctaagagaatgttaccacctgaacagtcctcggtgaatctgagaggagaggatggggtaaggcagaagcaccagctgtactactagaagggagcttttggtggtagatcccctggtgtctccaacctgactaggtggacagagctcaaagaggccctcttaccgctagcgaggtgataggacatctggcttgccacaaaggtctgttcgaccagacatatcctagctaagggatgtccaaacatcagaatgtgaggccaaccttctatcagagttaaacttttgacaagggaacaaatctcaaactgatccatcagtcatgtagctagctgtagagcttgcaacttaatagcagcagctgcccaatgccatgtgaagtaacaaactggtttttggtttttttttccccttcagttttaatgttatgtgtaatgtatttaaacccttatttaaataaaacttgttttcagaaatacctgacttgcagattatttatatatagtcgatcttgtgcatataaaggaaccatagaaatgggcagtggaggattcgtccacacccacagcttctcaacgggcctgaatttggccaagaaaaacctttatgagcttgtccctctctggtcaactggttttttgttcgtttgttttttgagacaggtttgcccttgttgcccaggctggagtgcagtggcacaatctcggctcactgcaacctccacctcaggttcaagcaattgtcgtgcctcagcctccctagtagctgggattacaggcaccatgcccagctaacttttgtatttttagtagagacagggtttctccatgttggccaggctggtcttgaacacctggcctcaagtgatctgcctgtcttggcctcccaaagtgctgggattacaggcatgagccaccatgcccagcaggtcaactgtttttgcaagcatttagccagagtcatgctgtgctgttaatcagtgtcctggagaatgggttgcttggaaatcttggcgccccctcagtagtaacagccttggtttaagggcgcagagtggagagtaaatgcaagggctataacaagggcattcatgctgtgggttaagatccacaaatcgctaggaatgtgtatactctgggtagtaagtttgtagtattagaaggtttaatgacaagtatttgaagagctgaagttaagtgttgggaggccatcccttatgaaggacaatgaatggcaagtaaaagaccaagttctgttcctgggtccattaatttagttaaaaaggcaaagttctttcagcacacatatctgcatgcagtcacgtgctgcctaaggatgcttcattcaacaatgagcctcacagccgtgctacacaataagattataatactgtatttttactgtaccttttaacattgtgttacaatggcctacaagaagcttgtgtggatggctttgaatgtggcccaacacgaactaataaattttgctaaaacatgagttttgtttggtgacttttttttttttctttttagttcatcagctattgttggtgtattttatgtgtggcccaagacaattcttccagtgtggcccagggaagtgaaaagatacgacacccctggcctacaatttcagcacagtaacgtgctgtacaggtttgtagcctaggagcaacaggctgtgtcatataacctaggcatgtagtaggctgtgccatccaggtgtgcgtaagtacacgatgatgttcgtagaaaacacaaaatcgcctaacgatgcgtttctcaaaacatgtccctgtcattgagtaatgcaagactactaagtttactaccagcccattttgtagataaaggtacaagcggtgagttaggttagagcccaggttgggaaagagcatagaaccaggtgagttgtggaggagggctggtgaggttgagccaatggcaactgccctaaaactaggaggtgattgtgttagaatacagcagactgaataattgatagagatttatttggctcacagaagtcgaaaggcatggcattggcatctggtgagggccttcttactgcatcataacatggtggaagggctggacagcaaatgggggccaaacctatactgttgtgagcccacttcattcatgagggcagaggctcaggacctaatacctttaaaaaccccaccttggccagccacagttgctcacacctgtaatcccagcacttgccaaggggggtgaatccttgagaccaacctgggcaacgtggcacaaccctatctctacaaacaatacaaaaattagccaggcatgatggcacacacctgtagtcccagctacttaggaggctgaggcaggaggaaggacgatcactggtgcccaggaagccaaggctatagttagctgtgatcatgtcactgccactgtactccagcctgggtgacagagtctccaaaaaaaaaaaaaaaaaagcgccccacctcccaataactgttcaattggcaattaaatttcaacatgggttttggtttgggtggagcattcaaactatagcaatgattctaaccccagcatcaggagcttgtcgtgttaaaggtcctacaaaaccagtctgtttcatgaacacaaaataatttagccttggagccaaccaaggctccaaatacagtggcattgttcaaaatatttgagtgaattttttttttttttgagatggagtcttgctctgttgcccagactggagtgcaatggcacggtctcgcctcactacagtttctgcctcccaggttcgagcgattctcctgcctcagcctcccgagtagctgggactacaggcacgtgccaccacgactggctaatttttgtatttttagtagagacagggtttcaccatgttggccaggatggtcccgatctccttgaccttgtgatccgcctgcctcagcctcccaaagtgctgggattacaggcatgagcaccgtgcctggctgggtgagacttttaaatcagtaagatttgactgtaatgtaggaggttttttcttggaggaacttctagagcaaggcgggaggccaaacacacaaaatactacaatcaggatgaaacagcaagagaagagaattccttctatgctgtaggttgtgaacacggccaggttctgtgctaggctgttccatctcatgctttttaaggacctccaattctctaggatgggattattccaagttaaaccatcaacatctattaaatcagctctgtgaagccaagcgaaacaagtatctgtgaacacagaactgaggaagttggtgaacacccttatccacctgatgtaacctatctcaggctgaatgaagaaaagtataattaaaaagtcatgatgggccgggcgcggtggctcacatctgtaatcctagcactttgggaggccaagacaggcggattgcctgagctcaggagttcgagaccagcctgggcaacaacggtgaaaccctgtctctactaaaatacaaaaaattagccgggcatggcggcgtgcgcctgtagtcccaggtgggaggctgaggcaggacaatcgcttgaacccaggaggcagaggttgcagtgagccaagattgcgccactgcactccagcctgggcaacagagcgagactccgtctccaaaaaaaaaaaagaaggcatgatggctggttatggtggctcatgcctgtaatcccagcactttgagagaccaaggcaggcagattgcttgagtccaggacttcgagaccagcctgggcaacatgactaaaccctgtctctacaaaaaatacaaaaattagccaggcgtggtgttgcatgcctatgctcccagctactggggaggccaaggtgggaaaatggcttgagcccaggaggcagaggtcgcagtgcgccaagatggcaccactgcactccaacctgggtgacagagatagacactgtctcaaaaaaagaaaacaatgtgatgtggacattcccaaggtaagttgtggagcctcatctagaacccaggactccctgtgtacccctcctcccaccagctgcacctgtacattcacaatttctgtaactcattttcccggtggagtgggagcagaaataaataaataaatgctcatcttacagagattgttgagtgcttggtatctgtagtacactacagggcatgtcaggcagaccccctgcactcagggagctgactgcctggtaggtagatgtaagaccagcacacagccttgacgcaggacagaaagggacccaaagagccacaggatctctgaggactgcgaaatcttccccactcccatcctcagccaagggggccaagaaggcttcataaaggaggtgctgtctgaagccaagcatttcgagcagagaaaaagagtcacacccagaggtgaaaaggcacctggaagccggcgcagtggctcacgcctgtaatcccagcacttagggaggccaaggccagcagatcacttgaggtcaggagttcgaggccagcctggtcaacatggcgaaatcccatttctactaaaaatacaaaaattagctgggcgtggtggcgggcgagatcgtgccactgcactccagcctgggcaacagagcgagactgcgtctcaaaaacaaaaacaacaacaaaaaaaagaaagattgattatgctgaaaaggtccctcagctctctgctccttagtcctcctctcccaccccaaacccccccagccctcctgcccccatccccacacgctgcaacagctacacgcaaggacaaactgagtgtttcttaagatggtgttatgaagacaaaatgaaaactggtcagctaaaactgcataagaagctacaaaacaactttagaacctattccaattgctgtcaactctatgaataagccagaaaaacacatagcatatttggagaactgaacatgacccccttcctggtttatcagcctcgatggtgcccccttgtggcagtagtgtaaaaacacagtttactgtgcacaaggctttacaatttttcaattaagagctccttgaccaatttttaactttttttttggtggggggacagagtctcactctgtttcccaggctggagtgcagtggggtctcctgctaggcaccatgcacccttgttgccccctcctgctcaagcctctcatttcttccactctctaaatgcaagcgttcccaagggattgtcctgactgtccttccctctcccttggtggtctcaccctatatcatggctttgtttgtcttcagtgttcctgatcctaaggctctgtgtccagctacgacttctcgtccaagtccagactccatcgatagctctttgccgcgttcattcattcattcattcattcatgcctatggagcactcactcagtgcaggtgctgtgccaggtgtgggggcccagtgatgaacaagagaaaccacactcctcgtggggtttgcagtactgcagtcggagagtcagattctaaaccaatcatcgtataaatactgaagaatttaaactgtgtttagaaggggccacattcgggtctgtgacagggagaggcacaatctctcttcttcctgcttttttttctccatagcacaactatatgacctatttgtagggcaacaatataatttatttgttcatttgattttggccatcttcccccactagaacataagttctgtgtgggcagaaacctttgtccagggctgtatccccagtgcctgcaagagagtctggcacatactaggtgctgaatacgtgtttattggatgaatgaatgggtcagactacgcgaagtttaaaatcgacagagttaccctctataaattatgtgacttgctagggccaggcacggtggctcacgcctgtaatcccagcactttgagaggccaaggcaggcggatcacttgaggtgagaggttcgagaccaggctaggcaacatggagaaaccccgtctctcctaaaaaaaaaaaaaaaaagagagagagttatgtgacttactctctcccctttgcatccctacttggtagagccggagggaaaggctggaattacatcagtagttctcagagtctggagactatgttagttgcctggggtgggggtgggagagaagagatgtatactactggtatccagtaagaagtggtcagagatgctgctaaacatcctgtgacccatggaacagcctcttacccccacacaaataactatctggcccaaaatatcaacagtgctgaggttgggaaaccctgggtcacatgaacctctgggaactgtcataaacccgggcaagcttttcagagtcacccacgtgactgccttctatcctgtgtcccgcagccaagcagctgctgtctctctcagtgagtctcaacactttttggacccaataatcctttcccctgttatatcagcaatctagaggactaacttgagaattttagatctttttcatcatatgcctggtatatgctgggaattttattttatttatttatttatttgaaatagataaaggcaggatctcactgtattgcccaggctggtctcaaactcttggactcaagtgatcctcctgcctctgcctcccaaagtgctggggattacaggcatgagccaccatgcccagactatgctaggaattttaagtaaaagataattggttggtaaattatatgatagtttcttccttctctaaagtgcatttaaagtataatctgtggtaatcataccattcaaagactattttgactttctccgttaaaaaagtgacaaaacacagtgtttatttatttattttagatctcccagggactcactaacaaacattgtatatataattggaagagaaagcaagcctagtgtggtggtatgtgcctgtagtcccagctactcaggagactgaggcaggaggatcacttgagcctaggagtttgaggctgcagtgagttatgatcacgccacggcactccagcctggatgacagagtgagatcctgtctcaaaaaaaaaaaaaagagaaaaaagaaaagtgccaaacaaattgaaaagtgatattacattatgtttggttatgagaacacatatatattaaaatgcagatttaggccggtcgtggtgactcacacctgtaatccttacactttgggaggctgaggcggacggaccacctgaggtcaggagtttgaaaccagcctggccaacatggcgaaaccccgactctactaaaaatacaaaacttagcgaactgtggaggtgtgtgcctgtaatcccagttactcaggaggctgaagcactagaatcacttgaacccgggaggcagagattacagtgagccgagatggcgtcactgcactccagcctgggcggcagagcaagactccatctcaaagtaaaataaaataaaatgcagatttagatttcattatgagtgttttattaacactaaagctcattaggatcccctgcttacactcactacattaaaatttgaatttataactcgtgtatttttccctagagcatgatataagacagtttcaggatactcatatccaaggagtttgcgaatagtacgtgagagatgtaggctgtccttggtccccataaatgaaaagccaaggccgggtgcggtggctcacacctgtaatcccagcactttggaaggctgaggtgggcggatcacgaggtcaggagttcaagaccagcctggccaacatggtgaaaccacgtctctactaaaaatacaaaaattagccaggtgtggtggtgcacgcctgtaattccagctactcaggaggctgaggcaggagaattgcttgaacctgggaggctaaagtttcagtgagctgagatggcaccattgcactccagcctgggcaacatagcgagactctgtatcagaaagaaaaaaaagaaaagccaaatcagatataaccgtcactgaattttctctgtcagcattgtttgtgacatcctggagccctcttaatcggttgacctgcgagtctggtgaggctcagtgggagtggctgggtagatcaccatcacttcgccacctgcagcagttctcgcctgagactctgaggcctgagcccaggcttggtatcactgaagggctccctgtttgattcccctgccagccagatacccacacctctcacctaatgcaatgatgctcgatccatactcaattcataactgtcgctttctatgcttctactgtccgtttttgtgtgctccaatgcagatctaaaactgcgatggaatgtgcacttataaaaacaatgccactgtctttttttaaccagtgaacagattgcaatataaagtccactaaagccaggcgcggtgactcacacttgtaatctcagcactttgggaggctgaggcgggtggatcacctgaggtcaggagttcgagaccagcctgaccaacatggtaaaaacccctctctactaaaaatacaaaaattagctgggcgcggtggctcacgcctgtaatcccagcactttgggaggctgagatgggcagatcatgaggtcaggagatcaagaccatcctggctaacacagtgaaaccctgtctctactaaaaatacaaaaaattagctgggcgtggtggtggatgcctgtagtcccagctactcgggaggctgaggcaggagaatggcatgaacccaggaggcggagcttgcagtgagccgagatcgggccactggactccagcctgggcgacagagcgagactccgtctcaaaaaaaaaaaaaaaatacaaaaattagctgggcgtggtggcgggcgcctgtaatcccagctaattgggaggctgaggcaggagaatcgcttgaacccagaaggcagaggttgtagtgagccgagataacgccactacactccagcctgggcaacacagcaagacaccgtctcaaaaaaataaataaataaaattaaaaaaaataaagtctgctaattttatggtctaaagtgctgcatttcaaacttttttcttttttttttttgagactgaatctcgctctgttgcccaggctggagtgcagtggcacaatcttggctcactgcaagctccacctcccaggttcatgccattctcctgcctcagcctcccgagtagctgggactacaggtgcctgccaccacgctcggctaatttttttttttttttgtaattttagtagagacggggtttcacctgtgttagccaggatggtctcaatctcctgacctcgtgatccacccacctcagtctcccaaagtgctgggattagaggcatgagccaccgagcccggcccttttcttttctttttttctttttttttttttttttgagacagtcttgctctgtcacccagtctggagtgcagaggcacgatcccagctcactataacctcagcctcttggattcaagcgattcctgtgcctcagcctcccaagtagctgggattacaggcatgcaccaacacgcccagctaatttttgtatttttagtagagatggggtttcatcatgttggccaggctggtctcaaacacctgaccctcaaatgatccacccgcctcagcctcccaaagtgctgggattacaggcgtgagccactgcatcaggctatatcagactttttttcaagacagggtctggttctgttacccaagatggagtgcagtggtgtggtcatggctcgttacaacttccgcctcccaagctcaagtgatcctcctgcctcagcctcctgagtaactgggactacaggcatgccccatcatgcctggctaatttttgtattttttgtagaggtgggatctcactatgttgtccaggctggtcttgaactcctgggcttaagtgatcctcccactttgccctcccaaagtgctaggattataggcgtgagccactgcatctggccttgaaactgtttaaaatgaagattgttaaaatggagattgattcagtagatctggggtagagcctgaaattctgcacatctatcaagctcccaggtgatgctgagcagcaaaaatctttagttctgtctccaaggtgggcaagtcataatctccctgaaccttatattccccttgtgcttgtttcctcctatatcacagaaatggagcgagaattaataactagacacacaaagggcatcatgtttatgttcaatgttcacttatttttcaacctctgtgctccctctgcttcctgtttttaaccaattgcccattatgggtataaattaaccataaaggactatgattaaagacaatttaaactgtgcagtgacccgggctgctgtgactgggtaacggctggcaagagtggctgtggattgagggagcccgtttggacacctgggtgccgcagggtcacggctcctgcgtgtggacctcctgtccaacaagcactctgttttaaaggagattttttaattttactattttttagagttggagtcttactctgtcacctaggctagggtgcagtgtcaccatcttagctcactgcaacctcctcctcctgggttcaagccattttcctgcctcagcctcctgagtagctgggattacaggcatgtgccaccatgcctggctaattttgtatttttagtagagacggggtttctccatattggtcaggctggtcttgaaaacctgacctcaggtgatccacccgccttagcatcccaaagtgttgggattacaggcgtgagccactgcgccaggccaatttttttttttttttttaagacacagtctcactctgttgcccaggctgagtacagtgatcatagctcactgcagcctccaactcctggtctcaagggatgctcccaccttggcctctcaaagtgctggaattacacccaaccaaaaaatccattcttaatcttagcaactctatcatttttttctgtttttctcaatcattaatctccgattttattatttttctttcttccttattttccttgattttgtggctctttttctaacttcttgagtttaaagattcacacatttattttagttcctttgtttaataatgaatgttttgttttattttgtttgagataggccctggagtgcaccagaccctatcacccaggctggagtgcactagtgcaatctgatcatagctcactgcagcctccaactcccgggctcaagcaatcctctcgcctcagcctcccaagtagctgggacttcaggttcacattgccacacctggctttttttttaagtagagacagggtctcgctatgttgcccaggctggtctcagactcctgggctcaagtgatcctcttacctcagcctcccaaagtgctgggattattgccgtgatccaccattaccggccatgaatactttttaatgctctaaattagatttggtccaggcgcggtggttcacatctgtaatcccagcactttgggaggccaaggcgggcagattgcttaaacctaggagttcgggaccagcccaggcaacatggcaaaatcctgtctctactaaaaaaaaaaaaaaaaaaattagccagtgcggtggtgtgtgcctgcaatcccagctgctcaggagactaacaggggagaatcacttgagcccaggaagccaagattgcgccactggacaccagcctgggcaacgggagtgagagagagcctgtctctaaattaataaataagatttggcaccatttctttgttttgttttgttttgttttgttttgtttgagatagtctcactcttgtcacccaggccagagtgcaatggcgcaatctcaactcactgcaacttccaccgcccaggttcaagcaattattctgcctcagcctcccgagtagctgggcttacaggcacgcgacaccatattcagctaattttttgtattattagtagagacggggtttcaccatgctggccaggctgaggcagaagaatcacttgaacccgggaggcggaggttgcagtgagccaagatcgtaccactgcactctagccggggcaacagagtgagacgctgtctcgaaaaaaaataaaataaaataaaaaataaataaaaatataaaaattagccgggtgtggtggtgagcacctgtaatcctagctacgcgagaggctgaggcaggagaatcgcttgaaccctggaggcggaggttgcagtgagccgagatcgcgccattgcactccagcctgggcaacaaaagcgaaactctgtctcaaaaaaaaaaaaaaaaaaggccgggtgcagtggctcacacttgtaatgccagcactttgggaggccgaggcgagtggattgcctgaggtcaagagttcgagaccagcctggccaacatagtgaaaccccgtctctactaaaaatacaaaaaatttgctgggcgtggtggcaggcacctgtaatcccagctacttgggaggctgaggcagaagaatcacttgaacccaggaagcggaggttgcagtaagctgagatcctgccattgcactccagcctgggcaacagagcgagactctgtctcaaaaaaaaaaaagaatgaagttctgatgtatactacaacatgaatgaatcacaaatgcatcatgctaagtaaaataacccatacacaaaaggccgtatattgtatgattccaattaaatgaaagtctcagaataggcaaattcttggagacagaaagtagatttgtggtttccagggaaaagggggaatgaggaatgactgcaaatgggtgtggggtgatgaaagtgttctgaattagataatggtgatagttgcacaaatgtgtgaactaaaagccactgaagctgggcttggtggcttgcatctccagtcctagctacttgggaggcttaggtgggaggatcattgagcccagaagttagagaatagcctgtgcaacacagcaaaaaacctgtctttggctgggcacagtggctcaagtctgtaatcccagcactttgggagcccaatgcaggaggatcacctgaattcaagaccggcctaggcaatataagaagaccccagccaggcgcagtgactcacgccagtaatcccagcactttgggaggccgaggcgggcagatcacttgaggtcagaagttcgagaccagcctgaccaacacggtgaaaccccatctctactaaaaatacaaaaaattagccagatgtggtgatgggcgcctgtaataccagctacttgggaggctgaggcaggagaatcacttgaactcgggaggtggaggttgcagtgagctgagttcataccactgcactccagcctgggtgacagaagaagactccgtctcaaaaaaaaaagaaaaagaaaaagaacttgtctcaaaaagaaagtaaataatataaaagccactgaagtgtatactttcaaagggcaaaaggtatggtatataaacaatatctaaataaatggcttttttttttttttttggagacagtctcactctgttgcccaggctggagtgcagtggtctgatctcggctcactgcaacctctaccccctggattcaggcaattctcctgcctcatcctcctgagtagctggattacaggcatgcgctaccactcccagctaatttttgtatttttattggagacgggggtttcaccatgttggccatgctggtctcgaactcctgttctcaagtgatctgcctgcctcagcctcccaaagtgctgggattacagacatgagccactgcgcctggctaaatggcttatttaaaaaaaaaaaaaaaaaaaaaaaaagaattgcatcatttccaaagctggctgggtgggcacattatgagcaggggtgttgcccttgccacatggcagcatctctctggctcgtggacagaaatgacctctgccgtctgccagggatcatttggaatcaggtgggtttatatatgcagcaaaacttcagtaaagcttgaagaaacgcactgatccttctaccttctctgaaataacgttctcaatagcgaggtcataggcataaccagccatccaaacctcccccatggccccttgagcccaccatgtgtcactccaacccaccccactcctgggctcaatagacaacaaagaaaagggaagagaaagaacaaagacccccctcgatcaccattgtgtccccagggtcagaacagtgcctgacacaaagcaggcacttggaaaatttgtgttgagtaaacagatgcatggatgaatgagtgaatgaaagagtgaaagcacacggtctctaagcaggcaggagggtctgggatgatgggccctggtggaggggctgacactgaatggggtgacagaacctccagcgatggaggaaaggaggaaaggacggaagcgggacttaggcagctgtgttcacggtggggaaaagggggctgacgtcaaatgaccttgggaatgaaagagaaatgattcaccacagttgccagtaacaaccaagctgcagaatattaatttgcaattgaatcaactggtcactttcggaaacttcctgtcggtttttgcagggagtggcaggagctgaggaaggggtcggggtggcctgtcagggacctgggaccagcctggcaggttcagaagcaggacaggggcagcaatctatgtgcatcacacagaactgagatgacaaaccctgggaggggtaggcgggctgggaggagccagacagtggaggagctggaggtcacagtgaagacagattcagcaggagcgaggcttctggagagggtgggatgggaagctgtgggccgagaagaggcagcagcacatggagtccaagacccgggggttccccaactcagctccctcacctcctacctgttgggccggggatgagccattcagcctggaacacacccgaataaagactcctctcatcctctcacagaggggcctttaggattatttttcccagttaaaaccactgttaggccaggcgtggtggcccatgcctataaatcccagggctttgggaggccaggagggaggatcacttgaggccaggtgatccaaatacaaagcctgggctgagaaccactgcttcgaaggcacaggtgggcatcagaggagaaaaggagagaggaggctcaggagagaagcggaagccagagtaagggtagccactactctctgtccttgacagcccagcctgggcccaggggtggtgggcagcctctccagcccagtctgcaagcagcttgcaggctgccctcttggccctgccatgtcaccactctcagacagcagctgaggccagaacccaagaacccacctccccctacctagccccctaccccaggggggatcatggatgccctcattgatgcaaacaccttccaggtgtcactgtttgtccccagaactaccacatcctccaaagccctggttgcctgggccagaatgattgagtcgtcatcaagctcttccttttctgccatcaataaccaattaggaagccaaggcactgcctccctgacaacggtttgcagctcatcaatagtgatctgtttcccaaagccagccctggcaggcaggagtgtgcctgggtccactgagaagcctctccctcctcagggaacagtctccttcacaggggacccttgtttttctgttactcttttttttttttttttttttttttttttttttttttttttgagacagagtctcactctgtcgccaggctggagtgcagtggcacgatcccagctcactgcaccctctgcctcccaggttcaagcaattctcctgcctcagcctcccaagtagctgggactacaggcacacaccaccacgcccggctttttttttttttttgtattttagtagagacagggtttcaccatgttgcccaggctggtcttgaactcctgagctcaggcaatctgcccaccttggcctcccaaagtgctaggattacaggcgtgagccaccacacccggccgtgtgttactcttttatgcccctagaatctaaactccaccaaagcaatgaaagggtctgtcctgtcatagtcacctgtttttttttttgagacaaagcttcactcttgttgcccaggctggcgtgcaatcgcacaatctcagctcattgcaacctctgcctcccatgttcaagcaattcttccacctcagcctcccaagtagccaggattacagacgtgcaccaccatgcccggctaattttgtattttttagtagagacagagtttcatcatgttggtcaggctggtcttgaactcccaaacttaagtgatccacccacctcagcctcccaaagtgctgggattacaggcgtgagccgctgcacccagcgctgtcatattcacctcttatccccaagtagcctcatctgtaccctagctcacagcaggtgctcagtaattggaatgaatttggaatattcggatggtcagaataactcaaagaacagctcccttctttgtatttgaaaatttacatggaaattcatgctgggccagtttttactaaacagaaaccttcacaaggctgtgatcccttgtatccatttttgattgctaccataataagtcaccacaatttagaagcttaaaacaacagcaatttattctctcgcggttctgtaggtcagaagtcctggtacagagtggctcacggggtcccctgattaggatctcccaaggccacaatcaggtcggcagggctgcatttctttctggaggctctagggatgaatccacttccaagctcatccaggttgttggccagatttcattctttgtagttgcggggctgacattcctctttcctggctgtcggtggagaacctctcagctcctcaaggccactgctttcctcgtcctgttgccctcctgccatcttcagaccagcaattgcttgtggagtcctcataactccagctctccgacctgaccttcagccacatctcttctgcctctagctgaagaaagttaagggctatgtgattacactgggcccagtcagataatccagcataaactccctaattttttttttcagagacaggggtctcactatgttgcccaggctggtctcaaactcctgggcttaagtgatcctcctgcctcagcctccagagtagctgggactacaggcatgcaccactgcacttggcataagctctctattttaaagccagtaaccttaatcacacctgcaacgtctcttttgttatgtaatcacatattcacaggttccaaggattggggcaggaacatctttggggacatgattgttctgcctgccacattcctactgggaggatagagacctgagtttcagacccacctctcctttttggtgtgtggactcaggatggggattacttcacctgtctaagccttagtttctacttcttttttttttttttttttttttttgagacagcgtctcactctgtctcccaagtacagtggcacaatcatggctcactgcaacctcacctccccggctcaagcaatcctcccacctcagcctcccaaatagctgggaccacagccacgcaccaccacacccagctaatttttgtattttttgtagagatggggttttgccatgttgcccaggctggtcttcaactgttgggctcaagtaatctgccggcctcggcctccccaggtgctgggattacaggcgtaagcccccgtacccatcagtttcttctgaagaaggggttcacactagcacttaggtcctaggatcatggtgaagagtgattgcattcattcatgctaagagcttatcagttcctggtacacggcattgttatcgttgtgatgacaggggcagggcccacacacctgcaccctcgagggggacggagatgggtcccaaggtctgggatctggtcttcaatttggtaggcccagaaattgaattttctgctcacccagctagtcggtgttagagccatgattcaaaccctggcctcaccagttccaaaaccccctgtacaccaggaggtccagcttccatagactctatccctgctgcctctttcagtggcagttgggctgaggtccctctgagtcacagctggcaggagggaaacccttggattcacagagtgatatgcttagggaattaccctcctttaagccttggggaaggagaactcccccaagtgtataaagcgtgtgcacagaccttgtcacctcttcccttcactgcagccctatgaggtacaaatgaatgattcctatttccaaatgtggttaattgagacccagagaggatgggggagaagacgcaaaatggattaaatacctgcgatattctcttttgtttgtctgtttgtttgagacagtctcactgtgtcacccaggctggagtgcaatggcacaatcttggctcactccaacctccacttcctgggttcaagcaattctcgtgcctcagcctcccaagtagctgggattacaggcatgtgccaccacgcccagctaatttttgtatttttagtagaaacggggtttcaccatgttgttcaggctggtctcgaactcctgacctcaggtgatctgcttgccttggcctcccaaagtgctgggatcacaggcatgagccaccgcacccggccaaatatctgcaatgttttgagcaccgtgcagggcgctttatgtacatcaccttcacgagaccctcctccccaagttactttcctcatttcctagaggagaaaacagctcagagaaggagagaaatatgctcaaagctcaacagctggaaaaagacaggaccaggaaacccttccttttccatcagacgaggtcccctcatgaggagaacgtgcagtccgtgactggggagctcctcagggtcaaggatgctcatctctgaatgcaacccttcccctgcagacctggcagggtctgcaaatagtgacattctttttttttttttttttttttttttgagacagagtctcgctctgtcaccaggctggagtgcaatggcatgatctcagctcactgcaacctctctgtgcctcccaggttcaagcgattctcctgcctcagtctcccgagtagctgggattacaggcgcccgccaccatgcccagctaatttttgtatttttagtagagtcaaggtttcaccatgttggccaggatggtctcgatctcttgacttcgtgatccacctgcctcagcctcccaaagtgctgggattacaggagtgagccaccaagcctggccaaatagtgacattctaaccattgcctatggaataggagacatgcttctatttgttgaaattgtcatccctcatgtaaccagcctggggaagaacattcaagggggcataaccccctccatgggcacaaactgagtcttgggctctggtacaaccagggttctactgaaaacttatcatttcccattagtgttaccatagcaacacgaatgtcttcattcattcccctagtgtatgaacagagctacactcaccccacctgttctcccaagccccctcaaagtcctttcatctctgagattctgtgattcaattaattatcaccaatgcctgcactgctttttgtcgttttcatttattccatctgctgagtcaccgtgtcctgctctagatgagagtggttattcacaacggttattcagccgtcagttgccatggacaccgcacagcctgcttccttcatcacccattaattctcagcaaggctggctgtaagcatgggtaccactgcagttacccaatacccaaggggatcaaactctcccagaaaaggtgggggcccaatgacgcatgaacaggagcaaaatctctgctctcaacagtggaaaagtaaaaaacagcctacggctcattacatctggtcaaaccatgtggaggcagcagtttatcaaataagtcaacaaggtaccattttgttttctggtccatctttggcaaatgctttagtctgtttgctaaccatttgaaggtatattttgatactgaaaagttgttggctgggcatggtggctcacgtctgtaatcccagaactttggcagactaagctgggccgatcatgaggtcaggagttcgagaccagcccgcccaacacgatgaaaccccatctctactaaaaatacaaaaaattagccaggcgtgggggcgtgcgcctgtaatcccagctactagggaggttgaggcagaagaatcgcttgaacccaggaggcggaggttccagtgagccgagatcacaccactgcactcctgcactccagcctggtgacagaactagactttgtctcaaaaaaaaaaaaaagttgttatgcagattactagctccccttgaaagcaaaatgaaggaggcttcaaaggcaggaccctccaggaattggttctgcatagggggtttgcaagtggtggtgcatgggcagctgacctagaagacacggggcagctacaagccaaacccagcccagcacagagggcctaaggagaagaaggcaccaagggtgttccatggtagggggagggtgaaaggacttcagaggtgaccaggatgtgagccactagaaggagagaacagggccatcagcccacaacccattgctcctggtaacacgttatgtttgcagagtccagtggaggggacggggaatcaatacatcaccccacattcacacgcttgccaaacatcagtggatggcgaaatccactttccctgaatctaagcccatcgggttcactccctcacctaccaccacccacaaaggtccctatgtagttcgagagataagtgccaggcctctgacccccaggatatggtgggaagcattgctcctgacccagggagcttggttcctgcccctcaggtacagctggagagctgccgccaccccgctccagcccctcaccatgaaggtcaactcccctatccttcccccacatcctggatgactgactgacactaaatgaaagggcggggcagggtgatgggctgtacctgtgccccaccccattcctctcgcctggactcatatggcagggtaggggcggggtggggggacagttgggagggaccttgagggctttataaggcaggcctggagcatcaagcagagcagagacctgagaggcaccaggcccagccgtggcaccacacacctcccagctctgcaggtgagaaaacccaggaggagaggggagaggctaggaagtgggttgacaggtcctctcccccatcaaggtaccaggccactggccagagtctggggctcaccccttggggtctccagagctgggaccctttctttatcccaggatggaactaggtcttggctccagtacctaccctggtattcccaaccttgccttccacctgcccttctgccgcagccggggccctgcccttagcctatcccttcacactcttcccagccctgggaggtgaggaggactggggttcttctcctttctctcagacaagaaaactgaggcccagaggcaagatgtgacttgcccaaagtcacagggattattaggcaaggctgggataggaatccacagctcctggatcccacttcaagccctttcctagaccagtgccatccaaaagaacgtcctatgatgcaggaaatggtcttcatctgcactgttcaatatggtagccactagccacgtgtgcgcttgaaatggggttagtgtaaggaagtttttgttgttgttgttgtttgtttttttatatagagtctcgccgtgtcacccaggctggagtgcagtgacatgcaacctctgcctcccaggttcaagcaattctcctgactcagcctcccgagtagccgggattacaggcgcctgccacaacacccagctaatttttcatatttttggtagagacagagtttcaccatgttggccaggctggtcacaaactcctgacctcaagtgatccaaccccctcagcctcccaaagtgctgggattacaggcgtgagccactgcacctgaccataattttttaatttaattaatttaaatgtaaagagccacatgtggctggtggctatagcactgaacaacacatgtggttagcatctgacaatacagctccagatcactgatttttcaaacatttcttcagcagcagaattcttttcttccaaagaaaacctaacagaaaacctgattatgaaaaacttaatggccaggcaccgtggctcatgcctgtgatcacaacactttgggaggctgaagcaagcagattgcttgagctcaggagttccagaccagcctgggcaacatagtgagacctcatctctactaaaaataaaaacaaaaaaattagctgggcatagtagtgcacacttgtagtcccaactactcaggaggctgaggtgggaggatctcttgagcccaagaggtcgaggctgcagcgagtcaggatcacgccagccactgcattccagcctgggagacagagcaagattctgtctcacaaaaagaaaagaaaaaaagaaaaacttaaaagcagtacagtattttattaatacaaatgtattctgacaagagaaaatttttatcattttcttatgataaagccaatcagaatagtgagaccaaaagcatacaaaaatagtgagtccagggaatagatgagcatttgaattttatgtttgtttgagattccagtttagttctgtattatgttttccccaaacttgattcaccctgatacataattgctaatggtgacagcttaattttttcttaactgcttcattataatcacaggatattcctcagttaagcaaaaatgacaggagaacctttcctctcagggctgcacaaaaatcagtgtgagctggccaagcattgaatgtgctgcagtctccaaagtgataacatgcggtctgtaacacagctggatgtccatgttcctttggtattactatttaaaagtttcactttttgtttttgtttttttgagacagggtctcactctgtcgcccaggctggagagcagtggtgcaatctcggctcactgcaacctccacctccccggttcaagcgatcctcccacctcggcctcccaagtagctgggaatacaggtgcatgccaccatgcctggctaatttttgtattttttgtagagatggggtttcagtatgttgcccaggctggtctcaaacttgtgggctcaagggatccatcctcctcagcctcccaaagtgctgggattaccatgcctggcctaaaaagttcactttaaataacaagtcttgggctgagcacagtggctcacatctgtaatcgcagcactttgggaggctgaggcgggaggattgcttgagcccaagagttcaagactagcttgggcaacatggtgaaaccctgtttctacaaaaaatacaaaaaaaattagctggacgtggtggtgcaagcctgtagtcccagctcttctggaggctgaggtgggaggatcacctgagcccaggaggtagaggctgcagtgagcagtgattgcactactgcactgcagcctgggcgacagagtgagaccctgtctcaataaataaataaattacattacttaaacagctacagaaccactaacatggcctcaaattctgcagaacagaacctagggaaaccattgccctaggatttgactttctccaatagaagcagtggctgtaatcggggtaggtaaagagaaaaaacacaagacttcggggctggtgtggaactggcagaaactggagaactgatctgaagaaatagtccacaactccacacagaattgcagactcacccgggtgcggtggctcatgcctgtaatcccagcatttgggaggccgaggcgggtggatcacctgaggtcaggagttcgagaccagcctggccaacatggtgaaaccccatctctactaaaaattacaaaaattagccaggcatggtggcacgtgcctatagtcacagatattctggaggctgaggcaggagaatcacttgaacccgggaggcggaggttatagtgagccgagatcccaccactgcactccagcctgggcaacaagagtgaaactctgtctaaaaaaaaaaaaaagaaagaattgcacactcatcagcaggtagaggcctggagccacatggttcagtcccctgcctctgggcctctgtggggacagcctcacccttaagctagtcccttctcccctttgcagacgagatgcagcgactgtgtgtgtatgtgctgatctttgcactggctctggccgccttctctgaagcttcttggaagccccgctcccagcagccagatgcacccttaggtacaggggccaacagggacctggagctaccctggctggagcagcagggcccagcctctcatcatcgaaggcagctgggaccccagggtcccccacacctcgtggcaggtaggagctgctgactgccctgcttgcctcacttggccaggtttggccaaggtctccccagactggctctgacttcagttcctggaaggtaggcatccttcccccattctcgcctctctcacctcctcagacccgtccaagaagcagggaccatggctggaggaagaagaagaagcctatggatggatggacttcggccgccgcagtgctgaggatgagaactaacaatcctagaaccaagcttcagagcctagccacctcccaccccactccagccctgtcccctgaaaaactgatcaaaaataaactagtttccagtggatcaatggactgtgtcagtgttgtagggcagaggagggggactcatctgggggtgaagttgtggcagggagaagagctgagtgcctcttaggggcagggaccctggctgattcttcttgggtcccccagagccccacattgaacgagaatccacaggtatgggcaggataatatatggtagggttcatagccagagtaacctttttttttaatttttattttattttatttttgagatggagtttcgctcttgtctcccaggctggagtgcaataatgagacctcagctcactgcaacctctgcctcctaggttcaagcgattttcctgcctcagcctcccaagtagctgggattacaggtgcccgccaccacacctggctaatttttttgtatttttagtggggacggggtttcaccatgttggccaggctggtcttgaactcctgacctcaggtgatccacccgcctcggcctcccaaagtgctgggattacaggcatgagccaccgtgcccagcctcagagtaagctttttaaaagataaaccgtgtcacactcggttttaacgttgcaatgtttcccagtgcacttagaatacaacctgaactccctgccacagccctgaaagctagccctgaggttctcctcccactgtgcgccaagtggcttccttctctttgtcctctcggtcctttcccttacacagacacgccatgttctctcttgctcagagcctccgaccttgccattccctgtgcctgcaacgctcttccccaggcacaaatatggtgggctcccctttcctccttagctcttgggtgaaatgcctcttcctgagagacctaccctttctgctcctcacccttcacacatagacccagttattctctaccacagggtcaaataaaagagaaaaaattaagctttttaaagaatgaatgctagttgtattcagaagtcttacagaggactatagattgaggcctccagcccaggagcaggctctggcacaatgtttcagcccattgcttatatacatctgggggctaaaggtggaggttccgtatgtgcaaaatcccatcagacttgctcagaattacatgacagcagaatcacagcaagatttgggtcctagatcacagaggcatcatcactaacctcgtcagatgtcatcttggaaatgttctgtgtcagaaaagccagggactaggattatttctcttttaagaaacgtgaagactcaagccgggcgcagtggctcacatctgtaatcccagcactttgggaggccgaggagggtggatcactttaggtcaggtgctcgagaccagcctggccaacaaggtgaaaccccgtctctactaaaaatacaaaatttagccaggcatgtgcctgtagtcctggctactcgggaggctgaggcaggagaattgcttgaacccgggaggcagaggttgcagtgagccaagattgcgccatgacactccagcctgggcaacagaacaagactctctttcaaagaaaaaaaaaaaagaagaagaaaagaaaagtagtgactcagccaagagacatgggagggcctcaggctctctcctgtgctgtcttcaaagcatctttccggagggctgcacgtctgtctctagtcacagagtcaggtgctttgtgaaactgtgccgacaagcagaaaggagcaaacacagcttcttaatgtttgttgctttgtctcacaatagcagaatattttctttagaacacatttcacaatctgtagttgttttgtttgccagtttattgtctgcctctcgggcaaaacaggaaactgggagcgtgacaagtccctcctcccttctgtatccccggtggcaagaataggaggaacccaataaatatttgtaaataattgctcatgagtggctggtgcaggcattgctggtgtctcactccattccatcattgttcttgtgcctgttgacaccattaccttgagctacccgccacctgagggctgtagaggagggaaagtgttttctctacccatcttaggtcctcggctggggctctgttataaaagacagattacaagagaaaagcaaacaagtttattaacatgtgtatcacacatttaacacacagagtacccagagttgagtaactcagagaggtagcttagaattcaggctcacactgtctacggccataccaccctgaacgcgcccgatcttgtctgatcttggaaactaagcacggtggggcctggttagtactcagatgggagaattcaggctcacagagcatcttcaacaaagaacaatacatttgtaggcaagataaaggacagcaatttttagacttccaagggtggctaactgtgtgtgggaaacagctttctgcccgtgggagctgagccctgtcccctctcagggctgggtctggtagccagtgggcctcccccggcttctcctgcccccctgggctgccatgtgacccacatccggcagtcacagctcttgtgccagctgcagaacaagggctggggttcctaccgcctgtcccagaagagggctgaggtccaggcccccaagctccagcctaggttagacttccaagggtggctaactgtgcatgggaaagcagctatatggaaaacgaatggtagataaaggctagtgagtcaagtttgttattagattgcactggtgccactccaggctgaaaggggtctaaagttgtctccgacttgttccagacattatggaaggaaaacgtcctacgtaaatgaaattgtcattctgtgtcctcccaccacagcagcagatgtgtccttccgttgagtgagggtaaccttacgtccaccaaggatacttggagaaagtctatgaggagcaagcttcagtcccacggtttcagactatttatgctctgaacacaagagtactggttaattatgttctcagctctcctcgctgttctaagtgtgcacttgttgcaagtaacttatatttttttatttgaatgtattttatttttttgagacagagtcttgctctgtcacccaggctggattgcagtagtgccatctcagctcactgcaacctccacctcccaggttcaagcgattctcctgcctcagcctctcaagtagctgggattataggcaggcaccaccatgccaggctaatttttgtactttttagtagaggtggggtttcaccatgttgtctaggctggtcctgaactcctgaccccgtgatccacccgcctcagcctcccaaagtgctgggattctctaggtgtgagccgctgcactcagcctgaatgtattttaaagcagtagatagaataacaaaggaatatgaaaaccatggattgaatggaccattttatgtattcagagagacgagccaccatcattgccagaaataccatgtaaaaattggcaatttggccagccgcagtggctcacgtctgtcatcccagcactttgggaagccaaggcaggcggatcacctgaggtcaggagttcgagaccagcctgaccaatacggtgaaacactgtctctactaaaaatacaaaaattagctgggcatggtgttatgcatctgtaatcccagctactcaggaggctgagacaggagaattgcttgagcccaggaggcagaggttgcagtgagctgagatcacgccattgcactccagcctgggagacagggcgagactctgtctcaaaaaaaaaaaaggcaatttggagattgcagtatttagtaaacaaataaatgatcaacattgtgcaaccactaccaaaaagtgtattgtaatgcatcaaaaatcaacattttattcactaatgagtatcaataaaataagtccaaattatggaaaccaaaaaaataataaaaaataaagttgtctccagatatttaactttttttttttttttttgagacagagtctcactctgttgcccaggctggagtgcagtggcacgatcttggctcactacaagctctgcctcccgggttcatgccattctcctgcctcagcgtcccaagtagctgggattacaggcgcccaccaccacgcctggctaattttttgtatttttagtagaggcggggtttcaccgtgttagccaggatggtctcgatctcctgacctcatgatccacccaccttggcctcccaaagtgctgggattacaggcatgagccaccgcgcccagctttatttatttatttatttatttttgacacagagtttcgctgttgttgcccaggctggagtgcaatggggcaatctcggctcactgcaacctccgcctcccaggtgcaagcaattcttttgcctcagcctcccaagtagctgggattacaggcatgtgccaccacacctggctaattttgtattttcagtagagacagggtttctccatgttgctcaggctggtcttgaactcctgacctcaggtgatccacccacctcggcctcccaaagtgttaggattacaggcatgagccaccgtgcccagcccagagatttaacttttatccttcctggtagatggacacagttgaaaatgtatgtcctgtttttatgcaaataggagggtagggagcttttcttgtatctgcttcttctcaattgccttcagctcaaaatagtccttatgccaaagtggcatatttggaggtaacacattctaatttccttcagggccaagtgcagggcagttaaatgcctccagaagcatctctcagacagtgtcagatgacagttagaggataaataccccagctcccccacccaaggggtgggataactctgagatatattcttttttttttttttccttgagacggagtttcactcttattgcccaggctggggtgtaatggtgcaatctcagctcaccgcaacctccacctcctggattcaagcgattctcctgtctcagcctcccgagtagctgggattacaggcatgtgtgccaccatgcccagttaattttgtatctttagtggagacggggtttctccattggtcaggctggtctcgaactcctgacctcaggtgatccacctgcctcgccctcccaatgtgctgggattacaggtgtgagccacctcacccaggctactctgagatatattctactgtcccccagagttcccagcaggactgagacccggttagccacagcaataatcttctcaatgatattcttttggcaggggggccacaaagtgtgttttatttttactattcatataaataattttctataatatcctggagcaaaccagagaatttggcagtcccatttgcgggtcccctcagagacccacaggccagtggcatctgtgtgaggtgcccaggttcacagagcagcttgtggcttgcatccaccttgcaggttgcttttcttccacatcaccactggggacttgaagataacaggggcagggaatcctccagattttaggaaatttcactgcttctcctgctcagtggtctctggtccacaaggtgttctcctgcatctccgtttccttcaaagctttatcaaagctggcaatttcccccatgtctggtttgtctgtcattttcttttctctttttttgagacagggtcttactctgtcacccaggttggagtacagtggtgcaacctcagctcactgcaacctcaaccttccaagctcaagtgatcctctcacctcagcctcccaagtagctgggattacaggggctgccaccatgcccagctaattttttttgtatttttagtagagacggggtttcaccatgttgaccaggctggtctcgaactcctgacctcaagtgatccacccacctcagcctcccaaagtgctgggattacaggcatgagccaccgcgcctggcctcccccagatattttcttgtgttttcaaatggagtctcgctgttgttgcccagactggagtgcagtggcatgatctccgctcactgcaacctctgcctcctgggttcaagtgatcctcctgcctcagcctcccaagtagctgggattacaggcacccaccaccacgcccagctaatttttgtatttttagtggagacggggtttcaccatgttggccaggctggtctcgaactcctgacctcaaatgatccacccacctcggcctcccaaagtgctaggattacaggcatgagccactgcacccagcctcccccaaatattttctatctgtggttagttgactccacggatgcagagcctgaggatacggagggcgactatacttgttcctaaaccctgttccaggtctgctctggggacttcaccctaagacagtgggtgactctctcccatcctatctttcacagccaggccactgagtcagtctctggggtgaaaggatcagggaagcatgagctcaaatcccagctccacactagccatgatctgctggtgagggcatcacttaacctactctggcctgagtttctccatccaacagacacttatgacatcacccaccgccctctaggagctgctgctatgattaaacggcgtatttaataggagtcctcggcacatacttcaatattagcatccaccctttctctacaacttcgccctgccaagtgcacacacacactccctagagagacagctggaggctgggccaggagggtatagatcctttatttcctgcaccacacgcacacaggctgacaagcaataggagattgagaggtgctgtgtgaaggggggcaggtacctgcaggaggcctcagtcccagcccccagctattgaggaacaaaggtgtgggaaagggcagaacatggaagaggaagccaggggcagggagggggggatcaagacagaggggagaggggctgggccacggatgggagcctggacacccccaggccactggcagaagagggagggagggagaggagacacaccactgggcagaggggccctcacccacccacacacagagacacttgtggttacaaacagtaggtagggactgagaagaaaggatgaagaacagggaagacagccaggtccctcaagtcaacaagaaccagggtggctaccattagcatgggcatcaaggggtgaggggcacattgttgggaaggcgctcacaactccctgccggtggaagctgggccctgttccctgctcagggctgagtctggtagccagtgggcctctcccgggcttctcctgccccctgggctgccatgtggcccagacctggcagccacagcttttgcaccagctgcagagcgagggccggggttcctaccgcctgtccctgaagacgttggaaaagcctccaacatgtgggaaagggcagaacatggaagaggaagccaggggcagggaggggtccccaagctccagcccaggttcatgaacacagagggtgggctggtgacagacacagggtcccatttcagaggatgggaaggagggtctgcgggtgtggggcttggccaggcagcagaaggaggggcctcaagctgtctgtggggcctctgcaggctgctggggaacagcaaagcctggaagagaagcaggtggatgtgaactggggcattgatgaccacaggcctggcctgggcggtgggcaggggtctgatcaactgtatcagaaggacacggaaagtcgccattgataattatgcaggttgccccctgcatgcgccataaaggtcatggttcagtttataacctgcacaagcttacatgacacgcctgctgaagccagtgctattccacccggcagtgaccaaagggccatgagaatggggacaggctgggacgggtaccaggacagcactagaggggagggatgggccagtgaaggtgctacagcacaggagtagagaggacgggctcagatctaccccggctgtgtggccccaaacaagtgtccttagctctctgagcctcaccctcctcacctaaccaatggggacacatcacctgccacggaatgaggctgatgggagctgatgcacgtgcaatggctgctgtgcatgagtgtcacaaggtcatctttcatgtcctgcggctccttaaagaggcagggctcacatggcctgcactcggaaggtgcagctcccagactttggggtttctggctggggagaggagaccctgttccaccccacaaccctgcaggaggccctagcccaccttctgacacccaggggactgttccaactgtggcccttgctggtgaaggcctttgtccccatagcctgggcagtcccagaaggcctctcttcctcccaggccgtgggagggtggctggccctgtcctccagcctgggtcagcccccgggctgctccaccatcccacccaccgccccccgtgtttgttttgactgctgctgccactgctgcagagttggagagcctgggggatagaggaggcaggggttgggggcaggggaagcaagcgggcagagatgggaagctgaggcgcagtgtgggggcacagtcccagccctaacccccagcccagcccccaggagaaaagtggatggagatctggaatcctaagcaaatgccacataaatgagcactgacactacggttcccactgaaggggatcagaggtgtctatgcaaatgatatgcaaagtccatgcaaataagcacagcaggtagagccaggctggggcaggtgagcactcggggagcttatccaccctctcttttcatcggcacgacgatctgcagcttgtccggctggcggcagggagggccccgtgggggcactcacctttctggagcatcttccacctcagctgccgcctgtaatgggcatcttgccagttggccagctgctggaggacataattcatgtccaggtgtgaagggcccaagccgctggcctccagggctgatgtcaccacgttcatccgcgttgcctcatccagctccagttccacctcctcccagccctcggtctcctctgacaccagctctgcctcttccatcaccccttcctcagccggcaccttcttggcagcccccagctcctcctggggcacgaactcctccgcaggcgtgaaatcttccccccgcatgatatccgctgccagcatcaacccttcctcagcctcaaacccccgcacctgctctcgatcctcactgtagcgaaaatcatacctgggcgggagatagcgacatcttttgaggggctggaaagtccaaccccccaggcccacccccacccgtctccacacagatcctgatggttcctcctggttctgtcccagccaggggagaggggagctaggtaccagctccaaggcttcaaatacccagcccatccccctggtgggagggaggaagaatggtcaccaacactgcataggccccatcttcttttatgtccctgaccctgcacggaatacaccaacagggttaacacccacttctgcctccctcctgcatgatttaaccttcatagcccaccccacagctacttgccataggaacaaatccattctagacaggctcagacaggtcaaatgacttgcccaaggacacacagtcaggaaagggaccacgctgggccttagtcccaggtgttcccagctcctaagccagtgcctgtcacctctcagcccatagtcagttgaaaagaaagcttcagtccccactcagagctgcctggaatcagacggccacccagggggcaagatttgaaggaaaagtggggcagctccttcccagaacagttctcagttcagccagccgagatagcagggccttctccggagttgcagggtggcagaaccagaggcaggtgggctgtctggctgctgaaagctgagggcaggttgtaggggagcccctggcaggcttaccttaggctggatgtgtcccctctgggcatctcataattccttcaaagagaaaaggaccttcattatgagacaatggaagccgaaactgcagtccctggggcttggtcaagctgaagaaccttaggtagtggccatgagcagtggctcacgcctgtaatcccagcactttgggaggccgaggtgggcaggtcacctgaggtcaggagttcaagaccagcctagccaacatggtaaaaccccgtctctactaaaactacaaaaattagctgggcttggccaggtgcagtggctcacgcctataatcccaacactttgagaggcccaggcgggtggatcacaaggtcaggagttcaagactagcctggccaacatctctactggcccatctctactaaaaatacaaaaattagccgggcgtggtgatggccacctgtagtcccagctactcaggaggctgaggtaggagaatcgcttgaacccaggaggcggaggttgcagtaagccgagatcacgccaacctggacaacaaaacaagactccatctcaaaaaacaaaaaaaaaattagccaggctcgtgcctgtagtcccaactacttggaaggctgaggcaggagactcgcttgaacccaggagatggaggttgcagtgagccaagatctcgccactgcactccagtccaggtgacagagtgagactcgtctcaaaaaaaaaaaaaaacctcaggctgggcatgatggctcacgcctgtaatcccagcactttgggaggctgaggcgggcagatcacctgaggtcaggagcttgagaccagcctggccaacagggtgaaactgtgtctctactaaaaatacaaaaagtagccgggcgtgatggcacatgcctgtaatcccagctactcggaaggctgaagcaggagaattgcttgaacctgggaggcagaggttgcagtgagccaagatcataccattgcactccagcttgggtgacagagcaagactccatctcaaaaaaaaaaaaaatacctcagggggaagtgatgggtccatattcatagagaagcaatgagtggaggggctgatgcagtgaacgaggcgggtatagggaagcgtggaaggtcagagtgtgagggcaaaccccctccccactacaggaaaggccatggcctatggggcaagggagggccccagccacgcacctctccataaaatacacagggtctgagatcatcctccttagagacgttctgagctcctcagccagcgtctcctggaaaccaggaagagtctcctatggtggagagaacagacgttaccagaggacccccacagaacccccacccataggctcaggcacagaagggaactgggatctcaatcagccaccaaggctgagacacaggcacagacgtaggaaagtgggcagccaggggagggtcctcaccagaggcacgctgtatgggtaatgggtggcagacccagtggacactgggggttgctggcggagggtcttcacctcctcctgcatctcaatcagcatgcccccacaatccatgtacttctcccgcaggtcctgcagctgggaacccacccacacgctctgctgggacccaggcacacccagtccagcactcctgcctatctgctctcaggctgaggccagaggcccaggttctggactccaagtgtcatgtgggggacccagggcaggtccctgcactccacaccactcagaccttgatggaactgtcacctgctgggctgtgccaggcatggagggggtggaaacggacaagactcagttcctgctagtcctctccagagtcaggtagctgccaagggcctggggtccccactctgggccagcggctctccagggtgggggcagaagccggcagcgagactcacctcttcctggagctgcatctggatttccttctccgaagccagctgcttctgcaacttttcagtctcagccccatactggaaggacccaaaaccagtgaacccccatctgaggcctacccactcagggcaccccctgcttccagcaagtcttcccaggcacatcagtgagtccttggcagcccatgaaatgacaagtcacacggaaggagggcaaagaaggcaggggagtcacgcagcctggttcctagaagactccaggaccctctctgggccttggtctcctcaagataacaaggggtcaagataaggggctctctgaggtctctgactctgacacagaaagggacctcaggcctggtggagccgagtggaggcaggaagaaggaagctagggtcccatggggccacgacaagagggttccacacacacccgactcaccatccggcagcgctgctgcagcttcagcacctgggcctgcagccgagcgacctcctgctgctgccgttcatagttttccagcctgagcaccagcacctccgacagctcagccatctgttggctggcctccgctggggagggcagaggacaggtcagccctggctcccctggccttcagggaccagctctggccctcccagatgcctctgtctcccccaccctcggctgctgcgctgtgccagtgggtcctgcagggctttgcattcctcactcaggtcttccattcaagaaatgttcattgactgatactgagcagggcaccagggtgagtggtcagtaagacccagccgccacactgaggtaaagttggtggggagacagaccacagtcacacatcatacaggccatgatgggcaaatgtcaagggtgtacagggcaggggcatcacagctacagcacccaacccgacctgcaaggtaaggaaggattcctggaaaaaggaaccactaagctaagaccacagggcaagtgaagctcacccaggcaaagaaggaaaaacatgggtccaagctgactggaaaggcccagaggccatcataagacactgggacggggagggcccagaacagtgcacacaggccagaccacagtagtgggcaagggggtggggtttatcctttggccaatggaaagctatttgggagttttaggcacagtaatgacgtggtcagacttgggtttgttggtttatttatttatttatttgagaccgaatctctgtcgtccaggcaggagtgcaatagtgcaatcttggctcactgtaactgccgcccgagtccaagcgattttcctgcctcagcctcccgagtacttgggattacaggcatgcgccaccacgcccagttaatttttgtatttttagtagagacggggtttcaccatgttggccaggctggtctcaaactcctgacctcaagagatccacctgcctctgcctcccaaagtgctgggattacaggggtgagccactgcacccggctacttgttttttaagaaatgaggtcttgggacaggcacagtggctcatgcctgtaatctcagcgctttgggaggctgagggggatggatcgcttgaggtcaggatttcaacaccagcttgcccaacatggtgaaaccccatctctactaaaaataccaaaattagctgtgcatggtggcgcatgcctgtaatcccagctactcgggaggctgaggcaggagaatcgcttaaactcgggaggtggaggttgcagtgagcaaagaccacaccactgcactccagcctgggttacagagggagcctccttctcaaaaaaaaaaaaaaaaaaaaaaaaaaaaaaggaaatgcggtcttggccgggcgtggtggctcacacctgtaatcctagcactgcgggaggccaaggcgggaggatcacttgaggtcaggaattcaagaccaacctggccaacatggtgaaaccccatctctactaaaaatacaaaaattagctgggcacggtagcacaggcctgtaatcccagctactcaggaggctgaggcaggagaatcacttgaacctgggaggcggaggttgcagtgagctgagatcatgacattgctctagctgggcgacagtgagactccgtcaaaaaaaaaaaaaaaaaaaaatttgccaggcgtgatggcacacaccagtagtcccagctactcaggaagctgaggcaggagaatcacttgaacccaggaggcaggggttgcagtgagccaagactgcaacactgtactccatctcaaaaaaaaaaagaaagaaagagagagagagagagagagagaaggaagaaaagaaagaaaagaaagaaaagaaaagaaaagaaaagaaaagaaaagaaaagaaagaaagaaagaaaaaatgaggtcttgccaggttcccaggctggggctggagtacagtggctattcataggtgcgatcctattactgatcagcatgggagttttgacctgctctgtttctgacctgagccagttcacccctcctcaggcaacccagtggtactccactccctggaccatactgaccctgtcggcatagtgtactacagcccagaattcacaggctcaagcaatcctcccacctcagcctcctgagtagctgggaccacaggtgggagcccctgcacctggccaggtttggttttagaaaactcattaaggctgtgtgcagaagttcctggtagggcgcgagtagaggcagtgcgaccagttaagaggtatcttgggctagaggcagcccgagtggggagggggaaaaagacttaagccattcctaggaggtaaaagcaacagagcttggggactggttcctactccagtagcctggggaccagtggggccattcagggagttgcagaacccagcaggaaggaaggtcagttctggggtaaagggaacagcaggagttcagctgttgccactttgcgtttgcatctcaccagctacacttgaactcctcaggcacaaacactgctcctcactcatcttcataaacacacagtgcctaggacgatgccaggcacagccactgccccgtgcatgactctgaactgtcccagccctgggtgcctggtctctggcagctcatggctccctcttgcctgccccaaataagagaagacaggcttggaggagacccacctttttttttttttgagatggagtcttgctctgtcgcccaggctggggtgcagtggcgtgatctaggctcactgcaaactctgtctcccaggttcaagcaattctcccacctcagcctcccaaggagctgggactacaggcttgtgccactgcatctggctaatttttgtatttttagtagagatagggtttctctaagttggttaggctggtctcaaactcctgacctcaggtgatccgccggcctcagcctcccaaactgttgggattacaggcatgagccaccgtgcctggcctgagacccacaatttctgtatagctctttatagtttgcacaaagtacttcctcagctgttgacactcttaatcttcataaaccctggagagatcagtggggctgagaaaattaatccccattctaaagacaaaggttcagagaggtcaaggaatgtatccaagttcacacagctaggagtgccagatctgggacttgaacttggatctccatactccacatcttgagttcttttctctgctccttgggacaaccccccaccccgagtgacaacattacgtacaaaactgctccacacactccagaatgagcatctgttcctcatcctcaagagtgtcgagttgagaggcctggagggagacaaagaggaagggacagggaagtcaacaccccctgctagcagggacgccctcctcccccattctcacctcttctctcagctgatgattctcctcctccagcagcctcagcttctcctgcaaggcttccagctgtgggcagtggtgctggtgcagcaatgcctcctgcgaaatcctaggggagggaggaatgggagtcagggtgcagggagtggggcttcccagttcccagcccaccagggctaagggcagtgttctcaattagttccagcaaccctgccagcaagcacatcacctgtgtccctcttaacaaatgaggaaattgaggctcagagaaaggacttgcaggtgcaaaggcaggaactcacagcttaggggcatcacagggatgagcacactgcaggtcttcctctgcttcttcttcttcctgttcctcttctgcctccttttcttcctcctcctcttcttcatcctcatcctcctcatcagaatctgagtagagctggaggagctcatcccgcaagttcacctggtgtctgaggtataaaatctggcaggaagagagaggagccatgggttgggagtgggcagggacaggagagggtcctggcatgaggcaggtgtagattggcccgctatcctctcctccccacccggttacctcctccttggctgagcccagcagggcttccagcttgctgttctcctccatcaaaacactgttctgtttcaccagggactggccgatgcgagctgcagtgttcaggtccctctctctctgcaggaccatcccataggtaacgctctcccagacaggtgggagaagctgggggggacacaggggtcagagagaggctaggcccctaagagaaccttccccatcccctagttctctagggtaccagaccagagtctgccattaacccactgtggaacctggctcagtttcccctcatggaaaaagaagatcagaccagattggctctgagagctcttccagcctgaacatcccacatcgacctgtcttccataagaaggaccctaacctggggccccagagagactgccaatcaggaaataaacaagacccccacccctacaggacaaaactagaataagggcttgcctggatcaggaaggcagtacacacctcctccagcaaatataacatcactttgacgtcttcctgggtgatctttttgactggcggaggtaggttaggacacagtgctgcaggaggcggcaggtggggagaaaaggcccagccaggtcaggaaaaaggagcagatgctaccagcaaacagctgtttcccgtcctatcgtcagttctccaacaagggtcatcgggagagaagactgggctcccctcctgccccccacatcctccccttacccctcggcactcaacactcccttccctgctcccagggccaagtggacagggtttttaggtttttgggttttttttggttttttttttttttggtttttttttttttttagacaaagccttgctcttgtcctccaggctggagtgcgatggcgagatctcagctcactgcaacgtctgcctcccagattcaagcaattctcctgcctcaacctcccgagtagctggggttatacacgcccgccaccacgcccagcttatttttgtatttttagtagagacggggtttcaccatgttggccaggctggtctcgaactcctgacctagtgatccgcccgcctcggcctgccaaagtgctggctgggattacaggcgtcagccaccgcgcccggcttttttttttttttttttttttttacccctggaggagcctgaggtaagggggtcacagtcctccaggctcagaaactgggctctccggacacctgggtccctggcgcctagaatggagacagccaggggaagtacagcctcagactggctcatcaccccctacccaggaggcagtgcaatggagtctcctgggtcatacaaacagacgcagccactcaccctgcacctgttgcgtgtgcagaggacaggaggaagacttcaccagattaggagacactcgagcctctaggcccaatccagagatctcccccgacccgcaggaggataggagagacaaggggcaggaaaagagcgcgactttgcccccatacccgcaaccaaaaagtgggcaaaacttccccctccgcccgcccacccacccctccatcgcacgcaagcccggtcggccagcgcagactcagagcgcgcgggacagcgccctcccgcagccccccgcccctctcctggcactgcggtagacccaggagaggggcgctgaaggggtgcagatctgccgcagcaagaggcgcgtggaggtgggtgggcgagcgtgcaggccccagaacctgactcacgggcacaaaccaggggacaagagcagaggaggagatggagaaggggcgaccagacagacaccgcagtgacatcgcgggggtggtggacgggtgacactgagtgctagagggggcggggtgcctggacccgatggggccacttcctccctggagttgccccagtccccacccggtccaggaccccgggggcccgatttaccttcctccagctcccgaataaaggcggcgcgctcagggccggacaccccgggtcgccggccaacgtaggcggctggcgtcttccagatgcccgctgcctttccagtcccccggccagtggcccgggaaccaaacggcccttggaatacgaagcgggtccacggcgcgtccgaattgtcgggcatagaccggacatccccttggatggccgagaatgcggacgggcgccgggctcctgccttggctccagcctccgaggccgggcgagctccggtgcgggcttccgagaggaactgggatccagaggtggctcgggatcctactctctgtccagtgccccgtgcctgcggctgcgcagagggctccggagcgggactggctgagggcgaaggtgcacaggtgagtgctgctgggtccccgggtccgagccggctccccgcgcagcaccggcccaacctcttcgggcgcatctcgagtctgccgtccgctgctgcggcgggacctttataacctgcgccagccgccgggccggaccacgcgtaggggtgggggctgccgagaagcaactagtggcaagcgggactcagagccgcgcgggaggggagctagtggtgacggaacagagcacagtaagaaaagcagggcaagaagggcgagtgcaagttccggatggctccgagttgggatgggagcgaaagattttttctgccctctccatctccggagaatggttctgcccaaagccgcggctgccccagcactcgcgggtccctggctgggggcagcccctccccagctgccgcgccggggtttcgggtgccttccctggtgtagaagctgccaacccaacgttgtgcatacggtctggggtggccagtgcattagggcagcgctgcgtctttcccggttgactgggagagacattccaaactccagtgcgcttccaacgtgctgcaaccctgcctggcgctgcaaccctgcctggcgctgcaaccctgcctggcgctgcaaccctgcctggcgctgcaaccctgaccctcgcgctcacaccccagtgctcgcgccactcgacgtcttccatttgattggattaactgttcttcacctccaaccctagttcgctttgccctcctcttgccatgctggcgaacccctgttctccttgggagacgcctcttaaaagtctccctgtagccgggcgcagtggctcacgcctgtaatcccagcactttgggaggccggggcaggcgaatcacctgaggtcaggagttccagacaagcctggccacctggtgaaaccctgtctctactaaaaatacaaaaattagccaagcatggtggcgtgtgcctgtagtcccagctactcaagaggctgaggcaggagaattgcttgaacctggaaggtagaggttgcagtgaaccgaaattgtgccaatgcactccagctggggctacagagcgagcctacccctcaaaataaataaataaatagaatactttttttttaagtatcctactggaaatgttgggtagacaattagatgtataaatctgaatgtaggggagagaccgggctggagatttaaatgtaggagtcattgttctttgatgaccatttaaagctatgagactggtgagatccccaagagactgagagaagacaggtaagagcgcccaggactaaccccctaggattcagagggcagaaagaagaagaggaggcatcaaaggaagactgggatgagtggggcagtgaagtagaggaaaaccaggaaagttgggtcctagaaagtaaagaaaatgtttcatgtagagagtggccacctgtgttgggtggtgctgttgggccaggcaaagactgaggacagagactcagcttggcaaactggggtcatgggcaaccttggtgagctggggtcatggcctcggcaagagcggtcttgcggggccaggcacagtggctcacacctgtaatcctagcactctgggaagccaaggcaggtggatcacctgaggtcaggagtttgagaccaacccagccaacatagtgaaaccccatctctactaaaatacaaaaattagctcggtgtggtggaacaagcctgtaagcccagctacttggaaggctgaggcaggggaattgcttgaacccaggaggcagaagtttcagtgagccgagattgcaccactgcactccagcctgggcaacagagcaagacttgtctcaaaaaaaaaaaaaaaaaaaaaaagagcggtcttggtagagggggtgagagagaccaaagaggagtgaggaaataacgagaggtaacaaaatgaaaacagaaagaaggctaggcgctgtggctcacacctataatcccagcactttgggaggcttaggagggtgaattgcttgagcccaggaatttgaggccaacctgggcaacatggcaaaaccctttcgctacaaaaaaatacaagaattggccgggcgcagtgactcacacctgtaatcccagcactttgggaagcctaggcgggtggatcgcctgaggtcaggattttgataccagcctggccaacatagtgaaaccccgtctctactaaaaatacaaaaaattagttgagcatggtgacgggtgcctgtaatcccaggtactcaggagaatcgcttgaacccgggaggcggaggttgcagtgagccgagattgcgccattgcactccaacctgggcaacaagagcgaaactccgtctcaaaaaaaaaaacatagctgggcatggtggtgcatacctgtactacttcaggggctgaggtgggaggatcacctgagcacaggtcgaggctgcactccagcctgggtgacagagcaagaccctgtcggaaggaaggaaggaaggcgggagggagggagggagggaggaaggaaggaaggaaggaaggaaggaaggaaggaaggaaggaagggagacagtatagaaaactgtattgaagaaatctgcaacaaaggagagctggaaaagggcacaggagctgaaggaggacatgagtgctggggagtgtgttttgaagatgggagagaggacaatatgtttacatgctgatggaaatgttccctcagggaggagaaaacaggtgcagaaaagagagcttatctcccagaatacttctggaaatggaggaactttcataacataaccgttctcctccttgttcaaagtctgcatgttttattttctttctttctttctttcttttttttttctttttttgagacggagtttcgctcttgttgccccaggctggagtgcaatggcacgatctcggctcaccacatcctccacctcccgtgttcaagcaattctcctgcctctgcctcagcctccccaataacatgcgtcaccacatccggctacttttgtctttttagtagagacggggtttctccatgttggttaggctggtctcgaactcccgacctcacgtgatccgcctcccccttggtctcccaaagtgctgggattacaggcgtgagccactgtgcccagcccaaagtctgcatgtttcctatggtttctttgtcagcagaaagcttgaaggagacacacaaccccagggtttgctacgacagtgaggttgaagaacataaggaggtggctgttcgggcatcggcacagcccaggcttccgtgaggctacagctccataggctctgccgagtggtcctcccacagcccagcttcctggactgtctctctgtgccttggacatctctgcagccccaaccaccaagcacagaacagggcatacagaagaagcctattacactcctgctgaattaaattgtttctggccccatgaggaagaagccctgggaaacccctggagagtttgacggggaagaaggcagaggcagtgggatggagaagacagagatgaagttaggagaccctgaaagctcccccagctgaccacaccctctaggtcagcgcactggcagccagcaactctggctacggccaccagagggcagtgtcagcccgtatacctccccacgtggcttcctcacctacaggctcagtcgccccacagaaagtggagtagggacagagactccattttacaaatggagaaaccagggctcagggcccgtcattctggaagtaagcattttggcctggctgacagatatctgcctttcgacagcctagggctgtccaggagactgggggtagtctctgatccaggcctctcaagtggttttcctctgtcaaccaccccctccctctcctgcttctcatctagggggagaaatcagacacagcaaagacccttggcctcctgtcctccctcccagtgtgcatccatggaccctcctggatccgaaagaggatgggagggtgcagaagacttgccaggctgcaaagccagaccacccaccacctaattgtgcacaccccctgaacctggggcacattcactccagtgcccagccctgggcagcacacaggtggctcaggcccctcctcctgccccctcccctggcctgaccctgggaaaaaaaacacctggaacagggtaggtaatagaaagagcccctaagggtcggtgccagggacctgggggggacaggcaccggggttactttctgcaggggagcagggtggaggggcaccctgaactaggaacaggggagacctcctcacccccgccgcagtcctgctgtctcctgcaggcctttcgggggccctcccccatctctgatccaggccttcccctccagaaccaggcagtggccgccatagccctcacccccaccccagaacccaggtacagtccctccttacatcagcagagaatgggggacttgagggcctaggccctcagaggttcccctttaacttttctttttgtttttttgagagggagtctcactctgtcgcccaggctggagatcagtggcatgatctcagctcactgcagcctccgcctcctgggttcaagcaattctcctgccttagcctcccgagtagctgggactacaggcacatgccaccatacccatctaatttttgtatttttagtagagacggggtttcaccattttgcccaggttggtcttgaactccggacctcaagtgatccatctagcctcggcctcccaaagtgctgggattataggcatgagccaccacacctggctccctttaacttttctcctcttcttaaagagcccagcccaactcctgggccactgagcccctctggcctggaacaaggaggtaacgaggtgctgggggcagctgggggtctgagccctctgcctgctgtcttccatggccccgctgctggccaggaccgaaagggagagaggcaaggagagaaaggacagagagcaagtgccggggacgagggcaaggggctgaggtggctgggacctcaggtggagagtactgacccccactctgaagttcttccccacctgggggctcctatcctggaggaaggccccgcctcccacacaggctcactcctgctcttggttctgatgtctgactcctcctctgagaagccctccctggtggggctcacctgtgttaggtatcctgtgccagatcaggcctctctgtgtcctcccctcccctggcattctctcccgactctgtccgctcacagggtaagatgatgtcattgacaagatgatctatttagtaacaatgagagcagtatctgttttgctcacttttgtattctcaggactctaatgaggcatccaataaatatttgttgaatgaacacatcagtggattctctgggtatggatggtgggagtggtaatcgccctggggaagtgacttccggtaagggtgagatcctaggactctggactcccaaaccagggctccacatcccctggcacaggtgagcgccaccaggaaccctccaggggcacctgtgggagaggatggagaccggccaggatgtgagccacagatccccagggagtgagccttggcacagccaggtgcccacttcttccctagagccctcagcccagccccgctcctttccccagggaccagagcaggaggcctgggctggcctgatatggagctgggtccagcaggtcggcagtgccctgacctgggaagctccacgggaagcagctgggagtggggggaccacagcaccctctgtgaggagggcaggaccgtcagctgcgtccagcctgctggacaggcaataccaggtggtggcgagcctagaaggatgttctggccctttggcctccctgagctacctccaggctcagggataacaccaaggagcccttcgctccctgacctctgtccccagagtcagcaattccctctcatccctgcgtccatgtccaggctctgagcccttccagggacaatttgtgggattggggatagagacagaggaataaatacacattcactgagacctgactaggtgccgtatggattttggatatatttcattttatcatcactggaaggaaaaaaatactgctgtgttatagatgaaaaacagaagcccagagaggtcaagcaacttatccaaggccacacagccaggaagtatcagggagggaagatcacaaaggcttgtcttaccaacagcccatgtgctgtccacggcctcccagttcagagaagaagctgggcgaccctccctctcccgtacccaggggtgcctgtgctcactgggtttgcttccacataatactacttatgagccaactgttaggtcttataaattagatgcccaccgtgggcatctgccccatggcctctggaggaatcctgccagaggatggagataaaggaaggacaaataccaagtgccttttgcagacgctatgtccgctcttccttcttcaagcctcagctcagacgccacccagtcttgggagcctcccctgatctaacctggctggatctgggtccctgcctcccagatccaatgtgcttccctctacctcagccttccacacactggggcaaaagcaagaagggcttctgtgcccagcttttagtatctgagcctgccttggcccatgcttgatgggctcagagggaaacacttgtactctgacataaatccgaaataacagaatcatcctgactggttccagtcttcaaaataagaaagactgagttttcaccataaacctggactcctggccgggcgcggtggctcacacctgtaatccagcactttgggaggccaaggcaggcagattgcttgagcccaggcgtttgagaccggcctaggcaacatggtgaaaccctgtctctacaaaaatacataaattagatggacatgattgtgcacgcctgtagtcccagctacttgcgggggctgaggcaggaggattgcttgagcccaggaggtcaaggctgcagttagccgtcttcccgccactgcactccagcctggatgacagagcaagaccttgtcataaataaataaacaaagaaacaaacaaataaatctgaactccctaacaaaaaataagcctattcctaaagctaagtcatgacctttgtgataaggtagtgaaatcgttgtggttcccatggcagaacggataatgtcaggctttcctttacatccttgccgtgttttgtatctgccccgccaggccttctgaaaaggaaccccctttactcctcataagtaaacgttcctctcctctatgtgtctgtctctttctttgacctgggctataaacactgatttctcacctgtgggccccactcaaggcaggggttggcagtcttcatctgtgcattccagagcctggtgcaggctagcaagcttgagcgctcgataaatacttaccggataacttagcaaactaggagagcaggcaacaccctgaccccaggcgcttcctcaaggcccagctctccccaaaccctcctccaggaagcccagagcatccttcaccttctccaaccacatcacgcccattgggctacaggagggccttgggctgcctcgcaggtggtcattgacactctcccgtgtgtagaggtctcagcttgaccaaaagctacagcatcaagaacacagacagctcctcacatgcttgtggtcaccccacctgggcacctcatacctagcaggggctccagcaacgtgcgctgattccttagtctggagggcaggctgtcatggtgtaggtggggcaaagtggcaccagggatgccctcagggcctggctgggcccttcactgctacaagtggtctccaaagtggaagatgttcactgctgtcctgacctctcaacctctcagctctcactcaacagtagacatcacagagagtctttgcagaggtttttttcttcttttttttttagatggagcctcactctatcgcccaggctggggtgcaatggcatgatctctgctcactgcaacctccgcctcccgggtgcaagtgattctcctgcctcagcctcccgagtagctgggattacgggcacacaccaccacgcccagctaattttttgtatttttagtagagacggggtttctttctttctttttttttttttcttttgagacagagtcttgctctgtcacccaggctggagtgcagtggcgtgatcttggctcactgcaagctctgcctcccaggttcatgccattctcttgcctcagtctcctgagtagctgggactacaggcgcccgccaccacacctggctaatttttttgtatgttttagtagagacgggatttcaccatgttagccaggatggtctcaatctcctgacctggtgatccacgcgccttggcctcccaaagtgctgggattacaggcgtgagccaccatgcccggcgtagagacggggtttcatcatgttgaccaggctggtctcgaactcctgacctcaagtgatccgcccacctcggcctcccaaagcgctgggattacaggcgtaagccaccttgccggccccttggcagaaatttttttttctttttttttctttttttgagacggagtttcgcttttgttgcccaaacgggagtgcgatggcacgatctcagctcactgcaacctctgtctcctgggttcaagcgcttctcctgcctcagcctcctgagtagctgggattacaggtgcgcgccatcacgaccagctaattttttgtatttttagtagaaatggatttcaccatgttaaccaggctggtctcaaactcctgacctcaagtgatctgcccgcctcggcctcccaaagtgctgggattacagtaggcatgagccaccgcgcctggccagagatttttataagacctccctggctttcagtttccctcatctgtaaaatggggataacgaatcataagtcctgcttagtaaagacttcctattaagtgggataaggaaagtaaggcacttagcagccacatagtacgtgcttagcaaaagcttcccctttgactccccagctggctcttggaggggaaaggaatcctcacccccttctctccacagtggagggcagagtgggcaaagccaggcagaggtagggcagggccaagcaggcagagcctagaggtcccttccattccagggcatcagagtgccatggcagacctaggaacagacaggcaggaggagccaggacaggttgtgatggggatcaggcattctccactaccctccaatcctcagctccctgaggaccacctggagttgggcctaacaggaagcccagggacacacctgggctcaaagtccacctgccccctgccctgtagctttaaatccagcaggcagctctgtcctgctgcagtcggtttctccacatgtgaaatggggataagaccgcctatatcacagggttcattcgagaacaaatgagaccacacacaccaagttgcactccaagagctccctcaacagtggtggctgttggccaggtgcagtggctcacacctggaatcccagcactttgggaggctgaggcaggaggatcgcttgaagccaggagttcaagaccagcctgggcaacataatgagatcctgtctctattaaaaaaaactttttttttttttgaatcagagtctctctctgtcgccaggctggagtgcagtagcgcgttcttggctcattgcaatgcaacctcctcctcccaggttcaagcaattctcctgcctcagcctcccgagtagctgggactgcaggtgcacaccaccgcgcccagctaatttttgtatttttagtagaggcaggatttcaccatgttggctaggatggtctcaatctcttgacctcgtgatcagcctgccttggcctcccaaagtgctgggattacaggcgtgagccactgcgcccagcctttttttttttttttttttttttgagacagagtttcactctgtcacctaggctagagtgcagtggcacaatctcagctcgtggtaacctccacctccgggttccggcaattccctgcctcagcctcccgagtagctggaattacaggcacatgccaccatgcccggctaatttttgcatttttagtagagatggagtttcaccatgttgaccaggctggtctcaaattcctgacctcaggtggtccacctgcttcagcctcccaaagtgctaggattacaggcatgagccaccgcgcccagcctaattttttttttcttttttgagagagagtctcgctctgtggcccaggctggagtgaagcggcgcaatctccactcactgcaacctccgcctcccaggttcaagcaattctacctcagcctccggagtagctgggactacaggcatgcatcaccacgcccggctaatttttgtatttttagtagaggtggggtttcgccatgttggccaggatggtctccatctcctgatgttgtgatccgcccgcctcggcctcccaaagtgctgggattacaggcgtgagccaccgcccccagcctaatttttgtatttttagtacagatggaattttgccatgttggccaggctagtcttgaacttctgacctcaggtgatgcgcctgcctcggcctcccaaagtgttgggattacaggcatgcgctatcacgcccggccctgcttcttgtataattgaccttcatattgcacagctggcagggctgtggcacttgagattatgcagtaaagcacccaatgagggctcaacaaatggtaacagttattgttaatatgattattaaaaacaatagagttggccaggtgcagtggctcatgcctgtaatcccagcactttgggacaccaaagcaggtagatagcttgaacccaggagttcgagaccagcctggccaacatagcaaaatcccatctttacaaacaaaaaaacccacaaaaattagccaggcgtggtggcgcatgcctgtagtcccagctagtcaggaggctgaggtgggaggaacacttgagcccaggaggcagaggttgcagtgagccgtgatttcggcacgccagcctgggtgacagagtgagaccctgtctcacaaaataaaagtcggggttgggggctgggggcagtggcttacgtctaatcccagcacttgggagtcagaagcagatggattgcctgagtccaggagcttgaaaccaggctcgacaacatagaaagacccccatctctatttaaaaaaaaaaaaaaaagaaaagaaagaaagaagaagccaatagggtcactaggcatgtcactcacacttctttggcctccaaagtgaaatgaaaggagaaacatttccaacctcaaggttgttagaaggaaggtacttacttagcacagggcccagcacaaagaaagctcagtctatgatgggcatgatcagtaagtgtcaccagtccctggctctccaagaatgacccaggacagaacctcaccttccaggacaggtgacagctaccttgcagttaaaaccaatcaggggaatcaggggttcccacccccatcttcttttttttgagacagagtctagctctcgttgcccaggctggagtgcaatggcgcgacgtcgcttcaccgcaacctcctcctcccaggttcaagtgattctcctgcctcagcctcccgagtagctaggatgacaggtatgtgccaccacgcctggctaattttgtatttttagtagagacggggtttcaccacgttggtcaggctggtctcaaacctctgacctcaggtgatcagcccaccttgatctcccaaagtgctgggattacaggcatcagccactgtgcccggcctcccactcccatcttctgcagaaccaaattcacagaccttggtctgacagacaaaggcccccccatctgacttttgctttactttccagccttgtttctggctgtcttaccggttcctctcccaggctggtcacatcaacccactgtcacttctcacaccctcccactaggtaggtcagatctccatgtcttcagtgctccagctgccaggaatgccaatgccttccctggggcccagcaaacacctcctcctcaaatctcactcactccttcttcctttatcagaatgaccctcttgcctccagttcccagactctcaagcgcatcgctctctcccacacttttctgtggattctcattggaagacaagaaggttgggcatctctattcccaggaccttgaaccaaggctggcaaagagcagcccttgggacacatttagtgaaagaatgaatgaatgaccaatgaatgtagccaatgcagtgcccattgctttccttgggagatattatacttctcttttattattattattattattattattttgagacagttttgctcctgttgcccaggctggagtgcaatggcgcgatctcggctcaccacaacctccgcctcccgggttcaagcgattctcctgcctcagcctcctgagtagctgggactacaggcatgcgccaccacacccagcgaattttgtatttttaatagagatggggtttctccatgttggtcaggctggtcttaaactcctgacctcaggtgatccacctgcctcggcctcccaaagtgctggtattacaggcatgagcctgtatgggaggctgggatgggagacattatacttctatcaatatgaagtaagtgccatggttaattttatgtgtcaacttgactggcacggggtgcccagattaaacattatttctggccaggggcagtggctcacgcctgtaatcctaacactttgggagactgaggagggcagatcacttgaggagtttgagaccagcctggccaacatggtgaaaccctgtttctttattttttgagacggagtcatgctctgtcgcccaggctggagtgcagtggcgcgatctccgctcactgcaagctccgcctcccgggttcacactattctcctgcctcagcctcccgagtagctgggactacaggcacctgccaccatgcccggctaattttttgtatttttagtagagacagggtttcaccgtgttagccaggattgtcttgatctcctaatctcatgatctgcccgcctcagcctcccaaagtgctgtgattacaggtgtgagctactgcaaccggctgaaaccctgtttctactaaaaatataaaaattagccaggcatgttaccatgcacctgtaattccagctactcaggagactaaggcatgagaatcacttgaaaccaggaggcagaggttgcagtgagctgagattgtgccactgcactctagcctgggtgatggagtgagactctgtctcaaaacaaacaagcaaacaaacaaaaaaccccacattatttcggctgggtgtggtggctcatgcctgtaatcccagcactttgggaggccaaggcgggcagatcacaaggtcaggagttcaagaccagcctggccaagatggtgaaaccccatctctactaaaactacaaaaattagccaggtgtggtggcaggcgcctgtaatcccagctactcaggaggctgaggcaggagaatcgcttgaacccgggtgacagaggttgcagtaagccgagattgcaccactgcactccagcctgggcaacagagagagactctgtctcaaaaataaataaataaataagtcggtagacagcaaagtagattgctctggccaatgtgggtgggtgtccttcgatatgttgagggcctgaagggaacaaaagaaattgccccctttcttccggcctcaccacttgagctgagacatttcatctcatctcctgggatttacatcatcagctcctccagttcccaggcctttggacttagactgaatggcgcccccagcttgtccgtctctctagcttatcatggtgcttcttagtctccataatcaattcctcataataaatcaactgggctgggcatggtggctcacacctataatcccagcactttgggaggccgaggcagatcacttgaggtcaggagttcaagaccagactagacaacatggcaaaaccctgtctctactaaaaatacaaaaattagccgggtgtggtggcacgcgcctgtagtcccagctacttgcgaggctgaggcaggagaatcacttgaacccaggaggcggaggttgcagtgagctaagatcacaccactgcactccagcctgggcaacacagcgagactccgtctcaaaaaaaaaaaaaaaaacactgattcctcataataaatctccatatatgtgtgtgtgtgtgtgtgtgtgtgtgtgtgtgtataaatctcactatgtttcccaggcttgtctcatattcctggctcaagtgatcctcccacctcagcctcccaattagttgcgactatagccccatatatatatatgcacacacacacatatacatgcacacacgtatatatacacatgcacacatatacacacaccaacatacatacacaaacatatatatgtgctattggttctgttgtctgaaaatcctaatacactggactgcatttttggctattttccattatatataatcattgtattagtaattttatcatgaacttgagagtcgactgagtttctcaaatctgtccctcatgtgctgggtatagcagaatttccccatactttctatatgggcatagatgttatttatttatttatttatttacttatttatttatttttgagatggcgtttcactcttgttgcccaggatagagggcaatggcacgatcttggctcactgcaacctccacctcctggcttcaagcgatcctcctgcctcagcctcccaagtagctgggattacaggcatgcaccaccatgcctggctaattttgtatttttagtagagacagggattctccatgttggtcaggctggtctcgaacccccgacctcaggtgatctgcctgcctcagtctcccaaagtgctgggattataggcgtgatccaccatgcccagcctaaataaaataaataaaatttattttattttatttatttattttgagatggaatctcactctgtcccctagtggagtgcagtggcacgatcttggctccctgcaacctccacctcctgggttcaagcgattctcctgcctcagcctcctgagtaactgggattacaggtgtgtgccaccatgcccggccaattgtttgtatttttagtagagataggatttcaccatgctggcgaggctggtctcgaactcctgaccttgtgatccacctgcctcggcctcccaaagtgctgggagtacaggtgtgagccactgcgcccagactcgggcatagatgttttaagatttcctacctagttgttattattattattattttgagacatggtcttgctctgtgagtcacccaggctggagagcagagcgatcaaagctcactacatgtcattcacagcttctcaaagaatgaaaaaaaacaaaaccaaaagaaaacaaaacaaaaaagctcactacatccttgacctcctgggctccagcaatcctcccacatcaggctccgagtagctgggaccgtaggtgccatccgtgctgggctaattttttttgttgttgtttaatcttttgtagagacaaggtctcactatattgcttaggctggtatttttttttctgtcctgcagtggcctctgtcctgtgcctctgtcctgcagtggcacaatctctgctcaccgcaacctccgcctcctgggttcaagtaattcttctgcctcagcctcccgagtagctgggactacaggtgcgtgccaccatgctggctaatttttgtatttttagtaaagatggggttttaccatgttgggcaggctagtctcaaaatcctgacctcaggtaatctgcccacctcagcctcccaaagtgcttgattacaggtgtgagccactgtacccgctgactgtcctcttttaagcccagtgacagactttctgggatgaggttgtgtacatgttttacattttttttggtatgactttaatgacatttatttttgagcaactgttttaaaattgacacttttttttcttttttctttttgagacaaggtctcactatgtttcccaggctggtctcaaattcttgggctcaagtgatcctcccgcctcagcctcccaagtagctgggactatagggccgtgccaccatacctggattaacacaatttttgagagcagttttagtttcacagctgatacattatttttaagacttattttaataacttgtcactcagtgtggcacctgcctttttgataggtctatctctgtctccactggttttgtagattctgacatagaaatgttggccatggcagatggcagatagagagcttcctccagatggacaggaccacgtctgctactccctggggataactgctccaccaagcccgctcacatcaccgaagcctgcatttgccctctggtcttgctgaaatgaaacccggacactcagagctttcctgccacctccctgaccaagcctacccaagaagaggcaaggttagtctggggagacttgttcctagctgtggcagccccctgtggtgatgtacccaatgccttatccatctttttctttcctactgtcagaaccctgagttttatgccaggtgcagtggctcacacctgtaatcccagaaccttaggaggccaaggtggaaggattgctagagaccatgagttcaaggccagcctggccaacatagccagactccatctttacaaatcatttacaaaaaaaaaaaaaaactagccaggcattgtggtgtgtacctgtagtctgtaatcccaattacgcatgaggctgacgcaggaggatcacctgaacccaggagttcgaggctgcagtgagctgtgatcatgccactgcactccagcctgggcaacagagcaagaccctgtctcttaaaaataaaacaaacaaacaaaaaaccctgattcttatcaagggggcactgtgtgcagctaaaatagtctccatttcccagctgtctttgcagcaaaggatgggcatgcgacatagctcaggccaaggtccagataagtccccagggtagatgtcccttctgaaaatcaaaaaggcataacctttccgggatatagcccattgccctttcctcccttctgcctacctggaatccctgtgctttctcatttcatcctcacattaggtacatggagaagggatcatcctcattttacatgtgaggaaactgacgttcagagaagcgaactgactttctcaaggttgcaaggctcagctagctcttccatgaaaactgaagtggccaactcactgcattgaaatgaactggcctggccgggcacggtggctcacacctgcaatcccagcactttggcaggccgaggcaggcagataacctgaggttgggagtttgggaccagtctgatcaacatgaagaaaacctgtctctactaacgatacaaaattagctgggcaaggtggtgcatgcctgtaatcccagctactcaggaggctgaagcaggaggatctcttgaacccgggaggtggaggttgcggtgagccaagattgcaccactgcactccagcctgggcaacaagagcgaaactctgtctcaaaaagaaaaagaaaaagaaagaaaggaaagaaggaaggaaggaaggaaggaaggagagagagagaaaaagaaaagaaaagaaagaaagaaattaactggccttaagtttcccattttggccaggctgccaggaagctgacggcctactgtgaagctccaatctagcactgccccttagcatggggacttagctgtctttctcttgtcctcagcacccgtcatgtggcttgagcgagcagtccttttctgtggggtgcctccggccctcttttggaaagctggggtggggaaatggcgttaatgtgtcagttatctatcttcattggcttctccagaccttttctccactctgcactgggcggtgggagatgacacgaatggacgtgaatgggctcttgtttctgcttgggctgggccagtagggagctctggtaggagggagcacggtcacagtctccccttgtcaggaagcctcatccacagggtcttgtcccagggagcaccccctctcctcccagtatcaggccagaggtgaatatcactataaatagcccggcaccctgtcctatcccttgcgctttcctatacatgcccacagctttgtaaactgtccccttaccacaatctcctcaaatcacccaattcgagtgtttcctgccagggtcctgaacacagagcacatataaagggcattgttggctggggacggtggctcacgcctgtaatcccagtactttgagaggctgaggtgggcagagaacctgaggtcaggagttcgagaccagcctggccaacatgggtaaaccccatctctactaaaaacacaaaaattagccggccaggcacaatggctcacacctataatagcacttcgggaggccgaggtgggtgggtcacgaggtcaggagatcgagaccatcctggctaacacggtgaaaccctgtagtcccagctactcgggaggctgaggcaggagaatggcgtgaacctgggaggcggaggttgcagtgagccgagatcgtgccactgcactccagagtgggcgacagagcaagactctgtctaaaaaataaataaataaataaataaataattagtcaggtgtggtgatgcacgcctgtagtcccaactattggggagcctgaggcaggagaatcacttgaacccaagaggtggaggttgtagtgggccgcgatcgtgccattgtactccagcctgggagataagagtgaaactactctcaaaaaaaaaaaaaaaaaaaaaaaaaaaaacgctgcggggtgggcgttgttaaaagatttttaggtcttccagagctctgaaaactctgtcccctccctgctgccccggctctagtcggcagagctcagctctgtgtctcatcacctagtgtctggaccttacagccagcccttaattggaagcacctccctgtctccagccccagccccacatcccaccaatcctctgtgaatgaagccatggcctccctccactgccctgagctccaggtggagtagaaagaaggcactgggccctgggcaggcacataggcaccacaggttctcaggtttgccgggtgcattgtaaccagcacctcctcagaaaggagaatttggggttgtgggtgggggaactgtcacatgagctaaaggacagaccaacgtgatgggtgaaatgacagttgtgcacggggcattgtggagcacagcaggaggggcacccgctcatccctgctgggggcggaggtcgtggagcaggtgtttctggagtcaggtctgagccgatcccggcaggtgaacagtggaggcacccagacagtgggaacagcatggacaaagaacaggaggaggctgctggctgtcacaggcacggctaagggcagagtaggtggtggggggaaggaagaggggaggtgggcaggagctggggtgggcccacagctgaccaacaaggggcctggacccaaagccataagcctcggggagcattacgcacggggacatctgccatattcactttaaggctggacgggaggagagccagccaggagcttgcctgtttgagagagaaacaaggcctggcctcccgaagtgagggactcatccccattcacctcctcccccgtcctcgccctacaagcgcatattgggttaaatccactccggctcccccaacactcctggctccccagcttgcctcttctagtccttcccacatgcaaggcagccctgaggacccgcaggacccagcaaagagggcgccaggccgctagggaagcccctcaactttcccaccccactcccctaaacagcctccaacgcatctgtgttatttttattttctttgctttggtctatacaaaaaaaccaataaccaaaaacataaagcgataataataaaacactctgcttggacctcccccagccccccacaccatgtgcgggaaatgggggggtctgaaacaggaaggggaagagaaagcccctcaccacacaccagaggggtcagccaagagcacttctcggggtcagctagggcagctgtgtgggtgggacaggggtgtgaggaagctgtccccagagctccctggggagtgaggggtgggcaaagccaactaagcaccctggagagagaagctggcatcttctggagcaggtgactcactccatatctcctccccatctcccctggacggtccctgaacttttcaagagaagttttggattttgggggtttgggtctcgaacctgggccctggaggccctgggggcttagggcagttggtcggtggagttcagtgagaaaatcagacccagagaaggaaccaaagcccttccgggcccaggcagctggagacagggaggctggaggtttggaggggcgttgctgggggaaaacagaatgggtacttgagtctgaagctttagtggccagggccacaggggcggggagggggtgtcaggccctggacccatgcccaggacagaaaagcaggagcagaacactatcccaagaaagaccctacggaggacctctggaggcgcagggtgcagcaggaagttacaccccggcttccccagctcaggcacttttctgtcttgccccatcgcctgcacggagagcctctcagatgaggaaccgcacctgttaggggagcggggacagacaggggtcaggggctcggtggacctgcatccccagaagctcaagccactccgtgtcacctgcccaccacccccagaaggggccagcaggaataggcctccccatccccaccaaagacacaagaagaaggcaggccagggcacaccgtgcttggggaagctcagcagcaaaggatccccccaaaaaaggagcgcaggtttcagcggggagatgggagggcctccaacagaaggaggttctagagaggaggaaaagcctgcaaagagggggccgtactggggccaggccgcctaggccagcatgtggtctgcagtggggtacgggggcctgaggccgtcgctgtaggtgtcgatggggtagtctccatccatgtccatgtgcatctccagcgggtcaaggggcacatcgctggagtacatggggcggtaggtggcatccatgtctggggacaaaaagtggggctcggtcctagggtctgcaagctaccctgcagggagcagtctgcacagccttcagctgcctcctctacccatgcccacccctggtgggcctgacccctccccagaccccacaccagggcatctagactggggtacatgtggatgccacacagcagttgccactggtcctctggccccggagacataatattgtcccctcacacacacccacacagccgcccaggatctccagggtcctgaagagcccggcacacacttaccatctccatagggctcattgatgggaatcatgctctgggcctgaaaaaggagagagaaacatggaggggaggtttgaaaatgcaggctccgagctggatctcagctggtgggcagggagagatgcttctaaaagagggggccaggctgggtgccatggctcacgcctgtaatcccagcactctgggagacagcaggcggatcacttgaggtcaggagttccagaccagcctggccaacatggtgaaaccctgtctctactaaaaatacaaaaaaaattagctgggcgtggtggtgcaggcctgtaatcccagctactcgggaggctgaggcaggagaattgcttgaatggggaggcagaggatgcagtgagccgagattacaccattgcactccagcctgggcgacaggagtgagactctgtctcgaaaaaaataaaaaataggctgggcgcagtggctcacgcctgtaatcccagcactttgggaggccaaggcgggcggatcacaaggtcaggagacaatcgagatcatcctggccaacatggcgaaaccgcgtctctactaaaaatagaaaaattagccgggtgtggtagcgtgcacctgtagtcccagttactcagaaggctgaggcaggagaattgcttgaaaccgggaggcggaggttgcagtgagccaagatcacaccactgcactccagcctggcgacagagcaagactccatctcaaaaaatataaaaataaataaataaataaaagagggggctggagaaaagcaaagaggccttggaggaatagaggatgatgaaatggggtcacccagtgccctgatatactcatgtcctcggtactccccagggaggagggttccccactcatgaagcagggactcctgccggactagagcagctcaggggaggaggcagaggactcaagaatgggtacagggcactgccccaccctggaaaagaccgcccatagcctatccagcacctccacgcaaattacaaaaaggcacccccacctcaaacactgtatactcatttgggcaaaataaaaattggcattttgtggatatatgattcaacccactacttccatctgctaggaattgttataaatgatccaattacaaaataaaaatctatgaagttgacagtagtaggagacccccaaaagtgttgcccatgggcagtgcccaacttgcacaaccaactactgtggtccaacctaggatactcacagcctcccaggcagccgggtcatgcttgaagagggagttggtgagctccacggacacgcgcttccggtagtctgggttcttgtcctcggagatgcggaacaggacggcagcagcgtaggtggctgagcagagaggaaaggaaaagccaggttaaacgtcggccagcctccatcgtggctgggggagtgggacccagcctcctgccctcccccagctcaccagtgccctcgttgcgggagtgcagcaactccatgagtggggccgaggccccctctgcatcaatggcgtcggccgcctccttgtcctgggccagctcacacagcaccccggcagccacgcgctggatgttctccaccgacgagtacaggagctggggagaggggacgtgggaagcaggggagaggtggaaaggggtgaggcaggccggacaacacaccccacagcactgcccacctccaccctgtagcaattccatagtggaaaatgggccgtcactggggagtaagtgttactgctttaaactgggctgagcattgttcatgagctaccttgaaattacctgtgactctgcctcatctaaccattggaatctagtgttaatgagctcactgatgtgaaagatgttagactcttcttgtctgttatggtacttgcacatattctcccagtttgctgattttttaaaaatgcttttttaggttctttctgaaatacagatggttttcatgtttatatggttgaatctcaagtttttttgttttttgttttttttttccatttgtgatctctttccttgctttgaagcttagaaagccatgcccatgcagggggttgctaagtagtcaatctggagtggcaactttcctccaaactcctccaaagacctcttgatacctggtccaggcctcccaaatctgggactcctaaccttgccctttaagcagtggtggggggacctctcctgcccacctgccccagactcacctgcacaaacaggggaatggtgttgagccggaagatctccatgcggttcatggggtcccgggcgaggatgtgcagtgctccggtgcagccctccacaatctcctccatcctcacaccatcctgtgtgagaggaggcagggggcatgggacaggtgccttggacatggccacaactcctccccatgacagccgaatgaacttcacaggttcttggaattggcatcagttgcaactgacctccccattcacacacacacccacagaggacaccctgaccccccaggaaggctgtcagaggcaccaccagctcacataccgtgtagggctgctgtgtgcctgcagctacgtggcgctgggcatcctggtgggccttcaccagcagttggacgaggcgggggatgaccgctgcctcctgcagcggggcatggttggctgggcacagggccagattcctgatcaagccgatggttgcctggcaaaaaaaggggcagtgatcaggggcacttcttggacatctgaaggatcccagcttcccagcttcaagtatcccttccctccttcacctcttctgtccccgaggccagacacagacatactggaaaatatccagagaaggagaccatcccagccatgtcacttaatccacaggatctgggagtgctcatggctaattcttttttttttttttttttgagacagagtttcgctcttgtcacccaggctggagtgcagtggtgcaatctcacctcactgcaacctccacctcctgggttcaagcgattctcctgcctcagcctcctgagtagctgcgattacaggtgcctgccaccatgcccagctaattttttgtatttttagtagagacggggtttcgccatgttgggcaggctggcctcgaacccctgacctcaggtgatccgcctgcttctgccttctaaagtgctgggattacaggtgtgggctaccacgtccggctgctcatggctaattctaatagcccttgctaaaatgacaccccattccagaacatcctgccagccccatgcctggcccctcaccctgtcccctctttcttaaccaccccccacagacaccatgaccttgcttgcttttctgatagtcctccaagcctgattctcaggaattctgtgctctaggtgcccccgaagcctcctgcttgggtggtgctcacattgtcattaatccccagcagggcagctctggaaagaggtgtcctgagatctcctccccagggtctttgactcagaggagccactctggcctcccagagcctctcaaggtgtcatctatttcatcctcaaaacaagacgccaggaggacagggatgaaaatcatgtgagatggggacgtgagcacagggcaaatgacttgccaaagtcacttgccacttagctgctgggttaggatgcaaagtcccacctcaggtttgcagcagggaccaagcatcaaggaggggtcacaatgacatttttttttctaaacatgaattttctttttttaattcaatgtataggccgggcgcagtggctcacgcctgtaatcctagcactttgggaggccaaggcaggcagatcactttaggtcaggagttcgagaccagcctggccaacatggtgaaaccacgtctctactaaaaatacagaaattagccgggaattgcttgaacctgggaggcggaggttgcagtgagctgagatcatgccactgcactccagcctgggcaacagagcaagaatctgtctcaaaaataataataataataaaaaataataattcaatgtgtagaatcacttagagtcattcttatctgcactgggttttttttgtttgtttgtttttttgtttgttttttttgagacggagtctcgctctgtcgcccaggctggagtgcagtggcgcgatctcagctcactgcaagctccgcctcccgggttcacaccattctcctgcctcagcctcctgagtagctgggaccacaggcgcccgccaccacgcctggctaatttctttgtatttttttagtagagatggggtttcaccgtgttagccaggatggtctcgatctcctgacctcgtgatccacacgcctcggcctcccaaagtgctaggattacaggcgtgagccaccacgcctggccatgttttttgtttttgttttccaagacggagtctctctctgtcacccaggctggagtgcaatgagcgatctcagctcactgcaacctctgccttccgggttcaagtaattcttctgcctcagccttccgagtagctgagattacaggcacatgccaccatggccagctaatttttgtattttttgtggaggcggggacttactatgttggccaggctggtctcgaactcctaacttcaggtaatcctcccgccccgtcctcccaaagtgctgggattacaggcgtgagccactgcgcctggcctgtctgtactattaaattgtcttaaatgtagctggcggatgcccctgccagctggctcctgtgcccgttgacaagaccctcatcgatggtagcttcctcactctctggcaccagatgccaccttgcctttggctgccttccttgtctctacatatagatatacacacacacaaacgctttcccccataactctgtcccttgggtctgcccacaccctgacccactctcacttcccccacctgacagggaagtgacacacagctagctctcttccacccaggtagcctcaagaagaagaccccactccttcacacacccaactccctatgggagatgctaagcgtccccagaatcctctgtgccctgtgtctctgtagtggctctcctgattttcagcaggacacacggccatctggctggtgatcacacttcctaacctccttgcaccttgatgtggctgaatgaccaagttctggggtgtgagcaggagtgatgtgtgccactttctggtggccgctagccatccccagttctcagggctagaacacatccgtggggatgatacagtccactcattcgtgtgaggacaaccctctcgtctacacccagtggcataagaaatgtgctccatggagcagcacctgcgagcttgttaaaaatacagaattgggccaggtgcagtggctcacacctgtaatcctagcactttggaaggccaaagtgggtggatcaccagaagtcaggagttcaagaccagcctaaccaacatagagaaatcccgtctctactaaaaaatgcaggagaatcgcttgaacccgggaggcggaggttgcagtaagccgagatcgcaccattgcactccagcctgggcaataagagcaaaactccgtctcaaaaaaaaaaaaaaaaagaagaaatacagaattgtccgggcctggtgtctcacacctgtaatccccgtactttgggaggctgaggctggtggatcacttgagttcaggagttcaagatcagtctgagcaacatggcaaaatcccatctctactaaaaatacaaaaattatccagacatggtggcgtgcacctgtaatcccaactactcaggaggccaaggcaggagaatcacttgaacccgggaagcagaggttgcagtgagccaagaatgtaccactgcactccagcctgggcaatagacattgtctcaaaacaacaaaaaaaagacatacagaatggcaagccctctgcagcaggcctgcagagagacagagagagagagagagagagagagagagagagagagagagagagagagagagagtgtgtgtgtgtgtgtgtgtgtgtgtgtgttttagattgtttatttgtttgggcttttttttttttccaaattttttgtaagagatgggtgtctcactatgttacccacgatggtctcaaactcctggcctcaagtgatccttccgcttccgcctctgcctgcacctcccaaagtgctggaactacagatgtgagccactgcacccagcctcctgtttttcttttcttttaagacacgggttcttgctctgtcacccaggctggagtgcactgatgcaatcatagctcactgtaacctccaactcctgtgctcaagcgatcctccgacctgagcctcccctccccagtagctgggaccacaggcgtgcaccaccacacctggctaatttctgttgttgttattgttgtcgagacaggtcttgctatgttgtccaggctggtctcaaattcctggcctcaagcaatcctcctacctttgcctcccaaagtgttgggattacaggcatgagccaccgtgcctggccctggaacctgcaatttaatgaaaccacccagggtactcatgtgcattttgaactctgagctctgccctaggggctggtagagctacaagatagaaatcccaattctggaattttagagcagagccattgttgaggtctaaactattacacgagagagaaataaacttctgtcttattcgagccactgtatttagggcttctttgctacagcggctttgcctataccaatacagcacctaagcctgctgcagggagctccttcccctcgcctaacagcagtaccttgaccagtggccactggttgggctggttgagcagcttcacgatggctgggatgccatagttgagacgcacagagttctgggccatctcggcctcagggtggcggctagtgaggtggcgcagagcgcagacggcaggctccgtgatgtcgtccttgtcaccagcacgcaggatggcatggatgagagcctccacaccgctgttctgtgtcaccagcgtcttgttcttgctgttgttgcatgtcaggttggagagtgtgcccgtggcacaggtgaggacgttgacgtcatccacactcagctgattcaccagaatcttcagcacactctccaggccctcctggagggcaaggaagggacgggggagtcagggagcagccaactccagggagccttctcgaatatgtccaaggggagtgggatgacctaaaggggtcagccctgcctgtgtgtgcccgggaactttcatccctatgacccgccacaccctgtgagagggcgttactatcctgtggtgcaagtgaggcaatgaggctcagagaggttggggaacttgcccacagacacacagctagtggctggatctgaacccaggcttggctctaagccccacatctcttccctccaactcatcagcctttccctggggccctcagacccaggcagaaccctcctcaggccaaagtacggtggccaagggaggcctcgagaccaggaggcaattgttgagggggccgcatgattcagtggcccagctgagccatgtctactcgcttgtcacctttctgggccttcactgctgccccaccaccctggggccctgagccaaatccatttccagtaaaatcactacctcagacgtctatctcacttctcccagggagacacgtgggccttgtggtggaacagaaaaaccccagctttggggacggacagtcctgggttcaaatcccagttctgccatttactacctgtgaccatggccattagctccccgagcctcagtgtcttcatctaacccacagggtcccacactctaaccccaggttgaatgagctactgtccacaaatgccacgcagagggccagcacagggtgagcacttgataaacagcatattgctaggggaggcctggggaatggttgttggaaggaggcacagggcacttgccctggagctgcatttttccttaaattgtatttttagtcatgggggcctgtctcttggtacactattgctccagcccagggcccaggtcaaaactgttcttttgctggatgtggtggctcacgcctgtaatcccagcactttgggaggccaaggcgggtggatcacctgaggtcaggagttcaagaccagcctgcccaacatggtgaaaccctgtctctaataaaaatacaaaaattagccagacatgatggcaggtgcctgtagtcccaactactcgggaggctgaggcaggagaatcacttgagcccaggaggcggagcttgcagtgagccgagattgcaccactgcactccagcctaggtgacagagtgagactccgtcagaaaaaaaaaaaaaaaaaaaaaaagagatgagggttttcaaggcatttccagcctcagtcacaaggaagagagatttagagcccccagtcctcccacagtacctcaggtcagatgcccagacaggaggctggatggggcagctgaagaggtcaaccccaggcccagatacctccctcacctgcttggtggccacatctgagaggttgcgcagggtccacaggcagttctgcaccaggcgggggctgttgctggtcaggtgcttgcccagggcctgcatcccacctggggcagggataggggtgccatcagccacggggagcatggctgactgagcctggcagctgggcagagctcccaccccagccgccctcaaggccatcatactcaccagcctccacaatggcaggcttattgctgggacacacggatagcaccttgagcacacgactggtggtccagagcagcttttcataactgtagttacgcatgatctgcacgagggcctggggcccaccattggccaggatgatcagctatgggtaaagagggaatgagtgtgagatggacggggaatatgacaggaacaaggaagcgcgggacaggagacagaactgtcattactgagcttcagctaaagcacgaatagttcgtttttttcttttaatgtatttttttctttttataaagatgggggtctcactatgctgcccaggctggtctagaactcctggcctcaagtgatcctcacacctcagcctcccaaagtgctgggattacagatgtgagccaccacacccagccaagcaccccaataagtttttttgtttttttttttgagatagagtctcgctctgtcacccaggctggagtgcagtggcacgatctcaggtcactacaacctccgcctcccgggttcaagcaattctcatgcctcagcctcccaagtagctgggattacaggcgtgtgccatcacgcccggctaatttctgtagtttttggtagagacagggtttcactatgttggccaggctggtttcaaactcctgacctcaggcaattcacccgcctctgcctcccaaagtgctgggattacaggcgtgaaccaccacacccagcccaccccaatagtttcatgactgttatgtaagccaaaattttgaaaaaaggataatacccagtgctgacaaggacatgacaaaactatatgcacacccattaccagttatggcactggaaattagtccagtccttctggaaatcaatctggccatttggggaaaagcctagaagtgttaaaaattgatgagaattttttccgctctttgacaaaggctagacattcattacagcattgtttataaaggtggaataggagcaatctaaataccctccctcagaataaagcctgaggtctccacttaatgaaatgctatctgtaggctgggtatggtggcccatgactttaatcccagcatttcggaggctgaagcaggaggattccttgagggtagcctgggcaacagagcaagacaccatccccacaaaaaatttaaaacttagcccgggtgctaattagctcagtagtatgttctcatagtcctagctatcaggaagactaagatgggaggaatgcttgagctcaggagtttgaggatgcagtgagctaggatcatgccactgcactctagcctgggtaacacagtgagaccctgtctcaaaaaagaaagaaaaggaaagaatgggaaggaaggaagaaagagaggaagagagggaaaggaaaaggaaaaggaaaaggaaaaaggaaaggggagggggaaaggggaaaggaaaggcaatctgtcattattagagggtggttttgaggacaatatagcaaaaaaaaattttttttaaacatcatacaggccaggcacagtggctcacacctgtaatcctgatactttgggaggccaaggcaggcagatcacttgagcccaggagtttgagaccagcctgggcaacatggagaaatcccatctctataaaaaattagttgggggtggggcacggtgtctcatgcctgtaatcccagcattttatgaggccgaggcagatggacaacctaaggtcaagagttcgagaccagcctggccaatgtggtgaaaccttgtctctactaaaaatacaaaaattagctgggtgtggtggcgggcacctgtaatcctagctacttgggaggctgaagcaggagaatcgcttgaacccgggaggcgaaggttgcagtgagccgagatcgtgccattgcactcctgcctgggcgacaaagtgagactccatctcaaacaaaaaaaaaaaaagaaagaaaagaaaaggaaaaaaaaaattagtcgggcgtggtagcacacgcctgaagtcccagctactctggaggctgaggtaggaggatcatctgagcccaggaagtcaaggctgcagtgagccctgattacaccactgcactctagcctgtgtgacagagtgagaccctgtctcaaaaaaaaaaaaaaaaaatcaggcagaaaacagatgcaatattgcagattgttatgatgacaaggatgtgtacacatctgtaatctgcccacagaacagctcttaaggaagcacatcgaaatgacaatagtggctatatgaggatgagtgattttttttttcccttatcctcaaaataataattctgggcaattcagtcgcatgatgaagcatgtatatctgcacctatatctcatctaaaaggagtaagggggcagcggcccaaggctgtgcaggatagaagatggcgcaagggtgggcttcaggcctcgggagagttggggagggcccaccttgctctcctggttgccgtaggccaggagctgcaggcagtcggtggtgatggccaggaacttggggttgttcttgttgagcaggggcaccatcttttgcagcccgtcggccaggcgcacggccatcttggcgccctcctggtacaggagcaggttgtgcagcgtggtgatggcatagaacaggaccgactccacaggggagctgggggggtgggcaggggttagtacgctgaggtcccagaggcctggcatacatgtgagcctggcatgggttcccacctcccccaggaagcctccccgctactgacgcccctctggaaatatccctttgctaaaatctcatcactccttgagcctgccctgctcttaagcatgaagcaaacagcacctctcttctcccaactgggacaatgactcctcctgcttctgagtccccagccctgtgctgagcgcacagtaggtcccctagacactgatccctactaagtaaccaccatgtggaaggccacatattagagaggccttgcaaggcgttcagaggggagtgaaatcagtgtctccccttcagggagcttccagcctggtatgggaatgagaaataaggccaggagcagtggctcacgtctgtaaactcagcgcttggggaggctgaggcaggtggatcaccctgaggttaggagttcgaaaccagcctggccaacgtggtgaaaccccgtctctactaaaaatacaaaattgagctgggcatggtggcagacgcctataatcccagcactttgggaggccaaggggggcagatcacctgaggtcaggagttcaagactagcctggccaacatggtgaaaccccatttttactaaaaatacaaaaattagccaggcatggtcgtgggtgcctgtaatccctgctacttgggaggctgaggcaggagaatctcttgaacccgggaggcagaggttgcagtaagccgagactgtgccattgcactccagcctgggcaacaggaggaaaactccatctcaaaacaaaaaaaaatagctaggtatggtggcagatgcttgtaatcccagctactcaggagactgaggcaggagaatcattcgaacccaggaggtggaggctgcagtgagctgagatcacgccactgcactccagcttgggtgacagagcaaggcctcatctcaaaaaaaaaaaaagaaatgaggccaatccacattttgtagggggccaggaaacagaaagtttgcaagggactttgcatttgctgttccctctgcctgggacactcttcccttcctctgcactagccaaactccactcatctgtcaatcccctgccattaagcgattccacctttgagcaatctcaatgctcttctgccatagcctgtgtcgtatcctgatcattaacctgctgtttacatgcctgtgttccctgctgggctgtgagccaccgagcacccggatggggtgtgcttctgcctggcacatagtaggtgctcactggatatttatggaagctcagggaagggaggggagaggcccaagtgagagggggtcctgggctcatgcagtgagcagggttgggtacctgagcatgcggaccagagcagggatgccacccgacttgaagatggcgagcagcccctcccggtggtgggagaggttgtgcaggatgctggtggtgcagcgggctgtgtccaggtcgctggtattctgcatggtacgcacgacagcggccaccagctggggcgagcccatcagggcccgccgcgacgcctccttcttcgacagctggttcacaatcatggccgccttggtcaccaccacctggagggcaaaggcaggggcggggacgtgagcactaaggagaggccgggatacccttccacagagctgaggagggccccagtcagactcatcacacacgggagagtctgggtcataacctccctccacccctacaatgtccctcccctgaggacatctgctctctcccctccctgcccagcccccaccctagcagggaccctcacagaccgggtcctcgtcgttgagcagtttggtgagctcgggcagggcgcgagtggccagctcggcatcgtcctggtagttgatgagatgcacaatggccgacttgagcagctgggacggctcggccagtcgctgcaggttggtggcctgcccctccacctgggtggccagcagaagcgagctgtcctcgcctgacacaccagggcacatggcctcccgcacccgtttggccctggctgttgtggacatctggtactccagatcacctgggggccatggggacagggactgagtgcaggcagtgggctgggcagacactggggagcagggcaggccacagacagccccacctgggtcctctgggctacctcttgccctgcccaaacccccagcacatgactggccattctacctctcaccaggaaccttggggaagtcaccatcacctcagtaatctctgtaaaataggccccacatgttctgtccatcaagggaatttttttttttttttgcacacttattatgtgcctggcagtgaattcaatgccctgcttatattttctcacataacctgacaacgaccctgcaaggtaagtactatcactggctccactttacagatgggaaaactgggcacagaggggttataaggcagcctgactcaggggcccaaacccctactctattctcctcccttacccatcaggtctgttttcaaccctgaaatctcaggagtctaattacaccctcatcatccccaacggtagcaatcctcccactatacaggcaggcaaacagaggcccagagaaccaccaacatcacatctcacagcagatcagagggaaagtcagggctgtgggttcagagagcaggagctgggtcctcagctgagacgtcaggttcctctctagcttccatcccctgggtgggtctgggagtcccacaggtaggtgcccaagcagccacaccctggcaactgtcctgatgcccccagggagagggacgcagaggttccaccctctaattagtcgagaaggaggagacagctgcatggctttcccacctggatgctgtactttttgctaccaacacagtgcctggccctgccagccaaaaggccccctgctacccctaccagctgtcagggaggagactggcatgcgagggctgagctccatagagccccaccagccacagtctactcacactactcccagcacccacagcccaccccctggcatgttcagggccctggaggcacctgtggccaacagttctagggcctggctattcctctctcccagaggggcaggggaggcttgggctggcggggcatccccatcccggactaagccccagagctgagtcagtcactcatcccacagccttggcctatctgcaggtcagccgcagaggcctggtctccctccaaccccaacgaggggccctcaggcttgacacctacacccctctacccaaaggggaatccctgggggttcctgggggctacggccctggctctcccacaaacgtgaggctcctgcagccaaagggctgcgtcctccctgccatccatgggctccctgagagccatagtgatacatcctcatcagactcttttttttactattttttgagacggagtctcactctgtcgcccaggctggagtgcagtggcgcaatctcagctcactccaacctctgcctcctgggttcaagcaattctcctgcctcagcctcccaagtagctgggactacaggtgcatgcgccaccacacccggctaatttttgtatttttagtagagacggggtttcatcatgttggccaggctggtctcaaactcctgacctcaggtgatctgcccacctcagcctcccaaagtgctgggattacaggcatgagccaccgtacccaatgtcttcatcagattcttatgttcacagaaggcaaggactatggcttttccttcagactggaggcaccctaagggcagggactatgccttccctccctactgatggttcacagaagaggattctgtgaccctcccagatgcagcaccctgaagtagctgcacctcctccttcagactgggtgggcccctagttagcatgagctgtgcctcctccctcagaccagagaccccctacaatctgcctcctttcactctgacctctctccaggacccaggcaggttttctgccccatgcaatagtccccaggggtcctgaccttggctggggggcaccccctgggtgtaagtggtggttttcttgagcgtgtactggcgcccgcaggcctcatcctcctccatgatgcccttgctgctgacggagggcacgcaggtgttggcgcccgagtggatacccgagtcgtaggtgtatgtctgctgccactcagtcaccttgataggctgctccatcaggttcatcacctccatcgtggctactgggggcacaaaggaggaagtcaggaagcaggaagtcacctggcccagcccccagcttcagcccgtcaccaagccccgcctgtcttcccacatcatcaccatggcccagggatttcaatgaggatgcaggctggggatggggggactgcccagaagggcaccaggcccagggaggggctgcccacgacgagataccctgggagcagtgagccccaggggtgcggctgtgtgtatgtcctgggcttgcatctctgacctcccagggggatgagccccagggggcaggacagtcaagggccagctgccgccagaagcccctgctcacgcaccttgctgccctgacccaactctcccaggggcaagagaaggcactcagggcttctagcagcttctgaggtcccctgggcccaccctcaactactggggctccctgggaaaggctgcagggaggaggcacccaagccattgggcaggaaactgggcggggcagggaagcggtctgacaggtttctctggagcgccccaggctccctcagagactccaggatctggctttcctacaggttgggcaggatcacacatggccctgaggtccagaccctaaggccccctctctcccagccctcccagtccctagacgcctctttgagtcccacagagcaattcaaatctcagctactcactactggggcagttcctctccccacagaacctcagtgtcctcatctgtaaagcggggtcacgccacctccctcagaggtggttgcgaggacctggtgcatagcaggtgctcagaggccacggccattatcatcagcactgcctctcctccagaagtgcttcctcacctcctggtctcctcgagcccaggctagggatctggggtggggcaggcctgtgggtggtcactgccgtcaggaacccctctctctctctgcaaaggtttaggcgcacctgaaggttaatgagtagcagggccgaactttgtaccagggaggtgaacttcccgcttggtctgtgtttggctccactgtcctgggaactgacctgcagaggtcagaggctgcggggagaatggacgccgtgatcccatgagggcctactacgagccagacctttcacagacaccgtcatgctcatgggcgggtttcaaagcccatgcactggtcccccgcgtacagatgcagaaactgaggttagaaatggcagagctgggactgggaccaggtgtgagggcaccaaggtctgtagtctttgcacatcccggcgcagcctcagtgagtaagcagaactcaggctggtccacccatgaagccaggcagcacccgggttgtctcactgtgatggggaccaggtgagggtggggtggctggggcaacctggccccaccccaggaacaaagatcaccaaggataagtcttccctgtgactgccccagtgccgccctggccctccaggaggatgacgaatggtcctgcaggtctcccagccttttatggcaggcagccgtgagcacacccggaacaggcagaggcaggggccaggccagctcccagctgcctccttcctctcctcccgcaatccctagtgactcagagtttcaggctgattaaacagaagcagtcccgccacctcagacggcagaccccagacgacaggctcgggccgccagatgtgcacagctgcttcccaggcattcgaaagtgtagctatttcagaaggagcccccccaaccagccccctttccacacgcaccccttccccacaccccttccccagcaacagaggggaatggccactggcaggaaacaggggcaatggtggggggcggggggcggggtgctcggagaaggcagacatgggaaaaccctactaaaatcctgagctcctcgtgctgtgccgccttccccaaccatttccctgccccaagggcaagtcccaagagagagcagaggagagtttggaagagaagctgcccccaggagagaaggaaggtgcaagtgtacaagtaaacacggtagcaataacccactgaatgccgctctgctgggctcaaggctgaacgacatctggacactgctggacatctgcagctctggtcaacaaacacactgcatcccagccagagggccctcctgcatagacagtgcctaaccctggggcttctcagctaagggagagggaagcgggcctcactccaaacaagggtcaccccttgccggcctcacatctaaagggaccaccacagtcaagctgaggaacttcctcagcaggcccctcaccacccccaccagcccaggtcaaccgccaggagactgctgagggctagacagctacccagggagagacagaagccacaggatgccatgggggggtgggggggtggacgcccagtggcctttattattatgtgaatctcattcttccctcaaagcaaccctggcagatgttttataatttccaatttctttctttctttcttttttttgagacagaatctctctctgtcgcccaagttggagtgcagtggcatgatcttggctcactgcaacctccacctcctgggttccagtgattctcctgcctcaacctctgaagtagctgggactacaggtgtgcaccaccacgcctggctaatttttgtatttttagtaaagaccgggtttccccatgttggccaggctggtcttgaactcctgacctcaggtgatccgcccacctcagcctcccaaagtgctgggattataggcttgggccactgtgcctggctttattcccaatttctaggtgaagaagctgtgcctgcacactgagaaaatggcagcacttgtggtaggaacagcatccagtccactagacaagcctgggtggagctgagccctcttgccaaggggaggaggggaccaaggtgcttgcagatggaagcagagcactcggctgcaaatcaagtgtcccaggttcgggtgcggtggctcacacctgtaatcccagcactttgggaggccaaggcgggcagatcacgaggtcaggagttcaagaccatcctggtcaacatggtgaaatcctgtctctactaaaaaagtacaaaaattagccaggcatggtggtgtgcacctgtaatcccagctactcgggaggctggggcgggagaattgcttaaaccagggaggtgcatgttgcagtgagccgagactgcgccactgcacttcagcctggctgacaacagagcaagaccctgtctcaaaaaaaaaaaaaaagagtcccaggttctagtcccagctctgccacaaacttgctgggtgtccttgtgtccctggatctcaaaggaatgttgatgtctaagattctagaaataaaaaaacaggattcccacaacagacagaagaaggctgggggtgggcaacgtcagagttgggaaccagttcagagagaggacacactccagaactcctcctgaggaaggggtcacgggagctattcctgcaacaggaaggctggaagtcagacctcaggcaggactgtcaaccagccccacccttctccttacctactgcccaggagaacaaaggaacttctctcacaagaaacaaaagtgctggttttacagttcccagggtggagggggccacacccagttcagtcttgtccctctccaccctggacctggagtcagacctcctgcaatgcccctggacagagccagggtggaagcgagagagacagacgcaggccctgcccactcatcccagccagagacgggcagggacagagacagggcgggtttctgagttgaatggggggcctttgtttagagcgtgctctattgttagcagcacgggaggaagaagccagatcagagactgtagggacagcccaaggacaggaagaaggaagacgggccctggagagggggtgcagaggacccttccccatgggacccacaccaggtaagtgtgagcaagtaataaggctagactgggtgcacccctacccttctttcctgcctcctcctctgcgcagccaacccagagggctggcaccgggcaccctaaatccaagactgacctggcagagtgtggcccagccctgacattaaaaatagccccaccagagctacaccaggctccttccccagccggcacctgccaaggacagtcagcaatgggcacatctaggctgggttgcagggcaccaagtgccaagacacctggaaataaggacaggagtgggttaccccagaggccgtgctggaagcagactcagaagcattgcatttgggaacagaggagcagggcggagcagggcagggctgggtcccccagaggttccttaggctagaggccagcaccctgtgcagacacaggtccccaggctcagacagcgacagggtgagcacaggattctgagtgaggagaggggctcaatttccttaagcctcattttctcatctgtaaaatggagatgatcaagtgacttcttttgtcactgtgactctggaagccctctgtccacaggaaaggcatgcattctcatgctagaagaacaaagagatggcagaggaggcggaagccagctggcgcagtggctcgtgcctataatcccagcattttggaaggcggaggtgggagggtcgtttgagcccaggagttcgaaaccagcctgggcaacatagtaagaccctgtctctacaaaaaataaaaagaaattagccgggcatggtggcatgcacctgcagtcccagctactctggaagctgaagcatcacttgagcccaggtgattgaggctgcagtgagccaggatcatgccactccagcctaggcaacagagcgagaccgtgtctcaaaacaaaaaggtgagggggccaggcgcggtggctcacgcctgtaatcccagcatattgggaggccaaggtgggtggatcacaaggtcaggagtttgagaccagcctggccaacatagtgaaaccccatctctactaaaaatacaaaaaattagccaggcgtggtggtgggcacctgtaatcccagctactcgggaggctgaggcaggcgaatcacttgaacctgggaggcggaggttgcagtgagccgagatcgcaccaattgcattccagccagggatacagtgcgagactctgtctcaaaaaaaaagaaaaataataaaaatttaaaaaggcgagggctggcacagagacctgtcgggcaaggtggatggcagtctgtctgggggagccctggctgctttctctgacccctgagatggggactaggtagggagctgcctcccaggccctggggaggtcaagggaacatggctgaggagaaggggagtggaacttcgctcacgccaggtggagacactggctgccctatgcccagtccatgctgcttcctgcagccaggggcagctgcacagccaggcgtgaacattccccacatagcagtcccagggggaagctgggctcagcaggatctccagcccccaccttccccactctgtccctggctcctgctgaggtctggccagcagttccaagcacagacacagactctagaaagtccagagagatggacatgatggcttcccttgagggcctgtttccctctcaggctggggctgcccaaggaggcctctcccctctggctggcagctccaggacggaacctcctgcagactacaggttctctggcagacactgtggtctccatcagcaagctggtccattccaagagggcagaactgaagcaggagctgtcagacaagctggtcttaggcttccggaggaaaaccctcacttccagtctggagagcagcccaggctgtggcctgaggatgagctggggcctgggggaggctcaggcctgccgacccagctgctgtttattttcctccttctgggctccttcccaaagcaaacaaacccgggtaggaaaatgaaggggatttgtaggagagggaatttgccacggccaagtggctcgacccagggacctctatgctcccctggagagggctccagctggagctccgttccctgctggtgacccccgtgggcagattcccaaactggcagatgaccccaaaccgggactcctgggaatggaaaaacacttcaccccacaccaggaaacaacaacaaaaggttgacgtgtgttggtgacgcaaaatacacaagtactctcattccactgcctccaaccaccaccagtggggcttgggcagcctggggtccaggggcggcccacttctcaataacagcagctccgatcccagctgactgaggcccactccctggggtgtgattctgcaaggatccctacatataaccctctcctgggaagatccatctgtttattgtacaacacatgctggaaaaccaggattggaataaagttttggctaaaatctgttactgtaggcagggtgcagtggctcacccctgtaatcccagcactttaggaggccaaggcaggtgaatccccttgagctcaggagctccagaccagtctgggcaacatggcgaaaccctgtctctacaaaaaaatgcaaaaattagccgggcgtggtggcatgtgcctgtagtcccagctacttgggaggctgaggtaggaggatcgcttgagcccaggaagaggaggttgcagtgagctgagatctgcactccagcctgggcaacacagtgagaccccatctcaaaaaaaaaaaatgttactatatacaggggatgagctcatcaagatcaaggctaaagaacaaaaggatgttgccgagcacggtggctcatgcctgtaatcccagcactttgggaggccgaggcgggcggatcacgaggtcaggagatcgagaccatactggctaatacggtgaaacctcatctctactaaaaatataaaaaattagccgggcgtgttagcgggtgcctgtagtcccagctactcgggaggctgaggcaggagaatggcatgaacccaggaggcggagcttgcagtgagccgagatcctgccactgcactccagcctgggtgacagagcgagactccgtctcaaaaaaaaagaaaaaaaggatgctaagaaaagaggaagagacttggctgggcgtggtggctcatgcctgtaatcccaggactttgggaggccaaggcgggtggatcacaaggtctggagtttgaaaccagcctggccaacatggtgaaaccccgtctctactaaaaatacaaaaaactagccaggcatggtggcaggtgcctgtaatcccagctactcaggaggctgaggcaggagaatcgcttgaaaccagaaggcagaggttgcagtgagctgagattgtgccactgtactccagcctgggcaacaagagcaaaactccgtctcaaaaaaaaaaaaagaggaagagaccttaatgaaagttgctttttaggattatgggcgattttttttcttttctcttaaacttttctaaacttcccaatttttttttttttttttttttgagacagatgtcacccaggctggagtgcagtggcacaatcttggctcactgcaagctccgcctcccgggttcacgccattctcctgcctcagcctccacagtagctggaactacaggtgcctgccacaacgcccagctaattctttgtattttttagtagagacggggtttcaccatgttagccaggatggtctcgatctcctgacctcgtgatgcgcccgcctcggcctcccaaagtgctgggattacaggcgtgagccaccgcggctggcccccagttttttttacaatgatcagatattactttttttattttctttctcttttttgagacaaggtctcgctctgttgcccaagctggagtatagtggcacaatcatggctcactgcagccttgaactcctgggctcaagcaatccttccgcctcagcctcccgagtagctaggaccacgtgcacatgccaccatgcttggctaatttttttttttttttttaagagatggggtcttgctatgttgcacaggctggcaggctggtctcaaagtcccggcctcaagcaatcctcctgcctcaaccttcagagcggttgggattacaggtgtaagccactgccccagccagatattaccttctcaatcaaggaagaggaggagtctcccctaaataagcagcttattgattgccaagcccctgtcccaactctgctctggtccctgctactgtctccatggtagggaaagacacagaaagctgagcttcagctgggcatggtggctcatgcccataatcccagcactttgggaggctgagatgggacaaatgcttgagctcaggagtccaagaccagcctgggcaacatagcaagaccctgtctctacacaaaactttaaaaattagctgggcatggtggtgcacacctgtggacccagctacttgggaggctgggcgggaggattgcttgaacccaggaattcaaggatgcagtgagctgtgatcacgccactgcactctagcctaagggacagagcgagtccctacctcaaaaaaaggaaagaaggccgggcgcagtggctcacgcctgtaatcccagcactttgggaggctgaggtgggtggatcacttgaggtcaggaattcaagaccagcctggccaacatagtgacacccccatctctactaaaaatacaaaaattagctgggcatggtggcgcatgcctgtagtcccagctacttaggaggatgaggcaggagaattgcttgaacctaggaggcagaggttgcagtgagccaagactgcactactgcactccagcctgggcgacagagcaggactccatctcaaaaaacaaaccaaaaaaaaaaaagaaagaaaagagaagaggagaagggaggaggaaagaaagctgagtgccaaaagcggtggctcacgcttataatcccagcatgtcgggaggccaaggtgagtggatcacctgaggtcaggagttcaagaccagcctgaccaatatggtgaaaccccgtctctactaaaaatacaaaaattaggccgggcacagtggctcacgcctgtaatcccagcactttgggaggccgaggcgggtggatcatgaggtcaggagatcgagaccatcctggcaaacacagtgaaaccccgtctctactaaaaacacaaaaaaattagccaggcgtggtggcgggcgcctgtagtcccagctactcgggaggctaaggcaggagaatggtgtgaacccagggggcggagcttgcagcgagcggagatcgtgccactgcactccagcctgggcgacagagtgagtgagactccgtctcaaaaaaaaaaaaaaaaaaaaattagctgggcgtactggcaggcgcttgtagtcccagctacgcgggaggctgagacaggagaatcacctgaacccgggagatggaggttgcagtgagccaagattgtgccactacactccagtctgggtgacagagtgagagactccatctcaaaaaaaaaaaaagaaagaaagaaagagaaaaagaaagctgagcttcctgctctgctggccccaaaggccaagatgccaggaggctgagcaaaggagagtggtccatgagcttgcccttcaggcctggcagaggaagtcgcttcacaataagatattccatgtccccagactcaaccatgtcccaggagaggccgctcagtgtcacttgcaggaacacaagccctggtgacctgcccagccacactgcttgcttttcctcttcacaggggtcacaggaccagctcacagatgcctttccctctcactgccaggtcgctcttctcccaaaagatacaaatgaggagtctccccaaagggcagcaattcctgtctggcctccctgccgcacaggatggccctcatcagagaagagtcaatgctgagtctccacctctccctcttatttctcaactcaagatttcatctttagcaggcagaaagcccctcctcctgtctagactgcgtcccttcagtaagtgcatcgggcctgcagctctcaagtcctcgggggagatggaaaaactgcaacctcatgccctctttgtagtagtcagtgggatggggttcattctgttttcttctctgtctcaagtcccattagccttctccacgatcaataatcccgttgcctggggtccccgcctgccctcagggaatccagaagcgcggtagtgacaggttcagtactccggctgcaccatcacataaagagaacccatttcccagaccccaaatccaggcccattctggtgtcagatgtccagttggcagagacaccagaaccaggcaggtctggagaacaatctgacaccagctcctccctagagggccaaggctctggctgacaggcagcacacatgacccccacctccatcaccagaaaagccctcccagcagctgcctatctcaggtctcttgggcttcagagcagaggacagccagttccccatcaagagcagcctggcagcactgcctcgtcaactccagcaggacattagcccaggcctaaatcggactctcgtttctcgccaatccccacagggcagcacccctttatcttggcatagccccagcccccagcaaagcaggcaactcccacttcctacacatgaacaagcccagaacagccatggttctacctaacccaagctaggaggcagcacagctttgacccctgcctcctctttccctctcaacctccccccaacactcaccacagccctggccttggggagaagccgcttccaccggaaactaaaaatcaagccactggggagatttaagtgggctggtggccaggacaggtatcacccccacctacaaaacctgccctacattcaccactcacacatgccttcatgggcccttctgaattctcttctccccagtcaggcagaggctctcaaaagggggtgcagaaaaatcctttccgctcacacctgtaatcccagcactttgggaggctgaggcgggcggatctcctgaaggtcaggagttcgagaccatcctgaccaacatggtgaaaccccatctctactaaaaatacaaaaattagcctagtgtggtggtgcatgcctgtaatcccagctactcgggaggctgagacaggagaatcgcttgaacccaggaggtagacgttacagtgagccgagatcgcgccactgcactccagcctgggtggcagagcgtgactccatctcaaaaaaaaaaaaaaaatcctttccagagctgcatggggcaatacagcaggatgggttctgggcttggaatcagaggacccaaacgtcagtcttggtgctgcttgggtctcgctgtacaacattggggaaattacttaagttccttgagtttcaatttcctcctctgtagaatgcgaataatgatacgcgttttttttgttttttttttttttttgagtcagggactcactctgttgcccaggctggaatacagtgacacagctcactgcagccttgacttccctgggctcaggtaatcctcccacctcaacattcccagtagctgggaccacaggcatgcaccaccacgcccggctaatttttctatttttttgtagagacagggtttctccatgttgcccaggctggtctggaactcctgggctcaatcaagcagtccacccttctgggcctcctaacgtgctgggattgcaggtctgagccatccagcctggccagccataaggattaagtaaaaatagttaatgaaagtgcttggtttgggccaggtgaggtggctcacgcctgtaatcccagcactttgggaggccggggcgggcgaatcacgaggtcaggagatcaagaccagcctgcgcaacatggtgaaaccctgtctctactaaaaatacaaaaatcagccgggggtggtggcacacgcctgtaatcctggctactcaggaggctgaggcaggagaatcacttgaacccaggaggcggaggttgcagtgagcctgggtgacagagcgagactccatctcaaaaaaaaaaaaaaaaaaaaaaaagaaagtgcttggtttctgtaaagtcttaccttgatcttgagttaccgtttgtcaagtacttactgggtagataggtattagtattcccattttgccaaagaggtcactgaggctcaggtaatgagagacagagctgggtctcaaacccagctcagttcaagcccaaagccctgtgctcagaactgccccactgtcccatctctccaaataaacagtccttctgtagactagtcaattgacccatctcactctaaggtggctccaggatgggaaaaaggttggcagccctagcccgacctttttcgttcctatgcactgcattctcaaagcctcggccctggcagcccaaacagaggctccagagggaatggggtggagccagggtgcaagggaggggtggagtgggggtgggagggctcaagtcacccaagctggggcttgatctagcaagaaatgactaactgggtcctaccttctcctcctcccccgcatcccccagtccagtcagtggccagttttcaccaagcacctcctagcagtacttcctcagtattatcttttcatcacagccacaaaccagattagctaaactaatcatgtagccaacataattacaatgccctcccctcctccaccttggcacagagaagagggaaagcaggttatttttgcccaaactccctgctcctgttgctccccagaggtgcagaatcccatcccccggcagaaaaggatctgagttcccacactgacttccccctagcacagggctgagcgtgatccccacccaggataaaggggctgagtctgggcccccagcctcactcccccatctacaacaaagaaagaggtggtagactcttcccctccaagcactctcgatccccgccccccacaatctttctcccacccccaggactgagagagaacccaactgttgtattctctctctgttccccaacgaggctgggctccaaatcctgcaaaaagaccacatttcagattttttttttaaaccggggtacaaaccctgatcaagatccccaattctgggtgggggggggcggtctcaggaaattgggagcagggaaggcagggggcccgatgcagctctgcctgagagagtctagcattgaagaaaccttcccccaaaaagccttcctgcggtctcactttccctgtcaaattctttcaggaaagcgggtgggaaaggtctgtgcaggcctccagaaagcatgcaccttcacaattcagaaatcaaatggaaggcaagtcccacagcctcatgcgcttctgcctcaataaccagccagctaagtaatgtgggggatggggtagaggcaaaaaaaaaaagacaagaacaaccactccccccaccttcctcagtttggcccagccctgccccacccccattcctggggagggggcagagcttgagagacaaccacttacgcaggccttgtctgagggggtgtggtggtcccaggaggcaggaagagaaggaagaagctgcttcccctctcagcactttccaccccccaccccggcccctacctcaggcccctggggcccagcgaacaggatgaatgtgggggcagggaagacagggtcggagcccaggcaccggcccaggttcagccaggggccggctgggggaaggggttttgcaccaggaaggaccccctaagcctaaaggaagttttgggcaaggagacgggaaaacccccagataaagctgctgtgaatacttcctcctgcaaagtttgttttgggtgattttttccaacaataagaggttagagaagacgggtcctgttcccctaccaacactctggcagccacagctactggaaactgggccaggtgaccctgaattcttcatccgtgcacagaccccaccccccagaccccagggcgagccacgggtgccagacaccagctggacactgagccgagccctgcaccccccagtcactccatcccacctccgctgaagaagccagagccgggctcccaccggcgtggagggaggcgccgcaggtagtatcgacgaggctctgggagctggagggcagggcctctggactccgtgcgctcacctgctcggcaggtggggccagagtcgctgggaaaatgtgcgctcggcccccacagttgggcaagctgggcgcaaacaatagggccccacccaggcctgggggagtagggagggagggaaagcgaggatgacgcgtggggtggggtgagggtggccccaaagagaccagcggcagcaagttccccaaacggtaaattcctgactgcagcgtgagccctgggacgcagtcgaagcagagcaaagtctcccccgccagcccagggcgagagtcagggacgcggcgtcgggcgagctgcgcgggccccgggggaggcgcgaccccggaggcacctgtccggatccctccccgccttgctcagatctctggttcgcggagctccgaggcgcgctcggcccgaaccgcgcgacccccaagtcgccgcgcccaggaccccagcgcgccccctgccgccggtgcagggtggcgctcgatggcaccggccctcacctgcccagggacggctgggaccggccccgcggccgctcgccacccctctgtccccaacgatacctgcgcccccgatagcccgcacctgagtatggggcctgaccgggccgggtcggggtcgggccggggtgggagccggcgcggacagcgaactgagctcggcgtggtcgggcggcggctgctccggactctggccaaggcagcaactcagtaaccgaacaaaaggcgaagagacctgacagccaagccacgcccctcgccacctcgaagctccgcccctgggggagacgcccaccctctggtgcgagctcactggctatctcgcctgactgtcccgtggaggggcggagcctcgcctccagtcctcttccacggccgcctctgtttatccgcttgccattggccccggggactgccagtcggctctagggatggactctaacttgaggtctcatcctaacattgcatctattggcagatagaaagttacttcctcctgattggacaaggctctgtcagtaagactaaggaaaaaaccaatggaagggatggggtgtgtcttgccccacccttgctctgagcaggtgagactcattactctccccttccccctacctgtccaacaggtaagtcatagggataccaagggaagggacagacgccttcaccggccagccaactcagcgtcaggcatgatgcttctttgggcttattcatccttgccccaaagtagtaatcacatatttgtatagcatttcataggctttgtgctggggtgggatttttttcccgaaagatggagtactcctgggatttagaattagaaggccaggtttggtcttctcccacttggtatgattttaggcaagttacttcaccctgtttctcctcttctgtaaactggatacattagccatatctacctcactggagtatgtggggattaaatgaggtcaggtttgtgaaagcactcagaaactgctaaaggttagaaatttaaattaacggtatgtttttttttaattattgtgacagctctgaaaaatagttaggatgagaaaacgaccctcattgtaaagatgaagaaaccgaagttcagagaagtcacaaaactacaaagtggcacaccccaagctagaacctccttcctctcatttgaaggaccatcaaaccagctgttcccctcatggaagaggagcatagacataaaatgtcaaggcaatggggaaggggcagagaaaaggcacaaacacttggaggagagacagaacaattaattggcacaaaaatacagtattggtgtcaggaggctttggtgggcttggaaacatcaagcagcagatctgaaggaaatccagccctggcatgaaagaaacggggcaggccaggcgcagtggctcactcctgtaatctcagcattttgggaggcaaaggcgggtggatcacctgaggtcgggagttcaacaccagcctggccaatatggtgaagccccatctctacaaaaaatacaaaaagttagccgagcgtggtggcgggcaactataatcccagctgcctgggagactgaggcaggagaattgcttgaacctgggaggcggaggttgcagtgagccgagaccatgtcactgcactccagcctgggcatgacagagcgagactccatctcaaacaaaaaaaaaaaaaagaaaagaaaaaaataaaccgggcag
